(19) United States
(12) Patent Application Publication
(10) Pub. No.: US 2022/0015372 A1
(43) Pub. Date: Jan. 20, 2022

(54) BIOLOGICALS AND THEIR USE IN PLANTS

(71) Applicant: PIONEER HI-BRED INTERNATIONAL, INC., JOHINSTON, IA (US)

(72) Inventors: Monique Coy, Johinston, IA (US); Steven D. Gruver, Pacifica, CA (US); Heather Kozy, Walnut Creek, CA (US); Lu Liu, Palo Alto, CA (US); Young-Jun Park, Fremont, CA (US); Barbara Rosen, Mountain View, CA (US); Ute Schellenberger, Palo Alto, CA (US); Jun-Zhi Wer, Johnston, IA (US); Weiping Xie, East Palo Alto, CA (US)

(73) Assignee: PIONEER HI-BRED INTERNATIONAL, INC., JOHINSTON, IA (US)

(21) Appl. No.: 17/312,763

(22) PCT Filed: Dec. 5, 2019
(86) PCT No.: PCT/US2019/064579

§ 371 Date: Jun. 10, 2021

Related U.S. Application Data
(60) Provisional application No. 62/779,642, filed on Dec. 14, 2018.

(51) Int. Cl. A01N 63/22; A01N 63/27; C12N 1/20; C07K 11/02; C12N 15/113

(52) U.S. Cl. CPC A01N 63/22; A01N 63/27; C12R 2001/36; C07K 11/02; C12N 15/113; C12N 1/205

(57) ABSTRACT

Biological strains, compositions, and methods of using the strains and compositions for reducing overall insect damage.

### CROSS-REFERENCE TO RELATED APPLICATIONS

[0001] This Application claims the benefit of U.S. Provisional Application No. 62/779,642 filed on Dec. 14, 2018, which is incorporated herein by reference in its entirety.

### FIELD

[0002] Biological strains, compositions, and methods of using the strains and compositions for reducing overall insect damage.

### REFERENCE TO SEQUENCE LISTING SUBMITTED ELECTRONICALLY

[0003] The official copy of the sequence listing is submitted electronically via EFS-Web as an ASCII formatted sequence listing with a file named 6593_SeqList.txt created on Aug. 21, 2018 and having a size of 1,395 kilobytes and is filed concurrently with the specification. The sequence listing contained in this ASCII formatted document is part of the specification and is herein incorporated by reference in its entirety.

### BACKGROUND

[0004] Certain species of microorganisms of the genus Bacillus are known to possess pesticidal activity against a range of insect pests including Lepidoptera, Diptera, Coleoptera, Hemiptera and others. Bacillus thuringiensis (Bt) and Bacillus popilliae are among the most successful biocontrol agents discovered to date. Insect pathogenicity has also been attributed to strains of B. larvae, B. lentimorbus, B. sphaericus and B. cereus. Microbial insecticides, particularly those obtained from Bacillus strains, have played an important role in agriculture as alternatives to chemical pest control.

[0005] Crop plants have been developed with enhanced insect resistance by genetically engineering crop plants to produce pesticidal proteins from Bacillus. For example, corn and cotton plants have been genetically engineered to produce pesticidal proteins isolated from strains of Bt. These genetically modified crops are now widely used in agriculture and have provided the farmer with an environmentally friendly alternative to traditional insect-control methods. While they have proven to be very successful commercially, these genetically modified, insect-resistant crop plants provide resistance to only a narrow range of the economically important insect pests. In some cases, insects can develop resistance to different insecticidal compounds, which raises the need to identify alternative biological control agents for pest control.

[0006] There has been a long felt need for environmentally friendly compositions and methods for controlling or eradicating insect pests of agricultural significance, i.e., methods that are selective, environmentally inert, non-persistent, and biodegradable, and that fit well into insect pest management schemes.

### SUMMARY

[0007] Some embodiments relate to a composition comprising a Pseudomonas chlororaphis, a Burkholderia rinojensis, or a Chromobacterium haemolyticum, wherein the Pseudomonas chlororaphis, Burkholderia rinojensis, or Chromobacterium haemolyticum has insecticidal activity. In some embodiments, the methods and compositions relate to a insecticidal bacterial strain comprising a DepA gene, a DepB gene, a DepC gene, a DepF gene, a DepG gene, DepH gene, a DepE gene, or a DepD gene. In some embodiments, the DepA gene comprises an amino acid sequence having at least 90% sequence identity to any one of SEQ ID NOs: 109, 121, 133, 145, 158, 171, 184, or 197. In some embodiments, the DepB gene comprises an amino acid sequence having at least 90% sequence identity to any one of SEQ ID NOs: 110, 122, 134, 146, 159, 172, 185, or 198. In some embodiments, the DepC gene comprises an amino acid sequence having at least 90% sequence identity to any one of SEQ ID NOs: 111, 123, 135, 147, 160, 173, 186, or 199. In some embodiments, the DepD gene comprises an amino acid sequence having at least 90% sequence identity to any one of SEQ ID NOs: 112, 124, 136, 148, 161, 174, 187, or 200. In some embodiments, the DepE gene comprises an amino acid sequence having at least 90% sequence identity to any one of SEQ ID NOs: 113, 125, 137, 149, 162, 175, 188, or 201. In some embodiments, the DepF gene comprises an amino acid sequence having at least 90% sequence identity to any one of SEQ ID NOs: 114, 126, 138, 150, 163, 176, 189, or 202. In some embodiments, the DepG gene comprises an amino acid sequence having at least 90% sequence identity to any one of SEQ ID NOs: 115, 127, 139, 151, 164, 177, 190, or 203. In some embodiments, the DepH gene comprises an amino acid sequence having at least 90% sequence identity to any one of SEQ ID NOs: 116, 128, 140, 152, 165, 178, 191, or 204. In some embodiments, the DepI gene comprises an amino acid sequence having at least 90% sequence identity to any one of SEQ ID NOs: 117, 129, 141, 153, 166, 179, 192, or 205. In some embodiments, the DepJ gene comprises an amino acid sequence having at least 90% sequence identity to any one of SEQ ID NOs: 118, 130, 142, 154, 167, 180, 193, or 206. In some embodiments, the DepK gene comprises an amino acid sequence having at least 90% sequence identity to any one of SEQ ID NOs: 143, 155, 168, 181, or 194. In some embodiments, the DepL gene comprises an amino acid sequence having at least 90% sequence identity to any one of SEQ ID NOs: 119, 131, 156, 169, 182, 195, or 207. In some embodiments, the DepM gene comprises an amino acid sequence having at least 90% sequence identity to any one of SEQ ID NOs: 120, 132, 144, 157, 170, 183, 196, or 208. In some embodiments, the methods and compositions relate to bacterial strains comprising a 16S RNA sequence having at least 95% identity to any one of SEQ ID NOs: 1-8.

[0008] In one embodiment, the disclosure relates to a composition comprising a Pseudomonas chlororaphis strain SS532D1 (NRRL Deposit No. B-67638), wherein the Pseudomonas chlororaphis strain SS532D1 has insecticidal activity.

[0009] In one embodiment, the disclosure relates to a composition comprising a Pseudomonas chlororaphis strain SSP459B9-3 (NRRL Deposit No. B-67639), wherein the Pseudomonas chlororaphis strain SS532D1 has insecticidal activity.

[0010] In one embodiment, the disclosure relates to a composition comprising a Burkholderia rinojensis strain JH59178-1 (NRRL Deposit No. B-67640), wherein the Burkholderia rinojensis strain JH59178-1 has insecticidal activity.

[0011] In one embodiment, the disclosure relates to a composition comprising a Chromobacterium haemolyticum strain JH91791-1 (NRRL Deposit No. B-67642), wherein the Chromobacterium haemolyticum strain JH91791-1 has insecticidal activity.

[0012] In one embodiment, the disclosure relates to a composition comprising a Chromobacterium haemolyticum strain PMCJ4191H4-1 NRRL Deposit No. B-67644), wherein the Chromobacterium haemolyticum strain PMCJ4191H4-1 has insecticidal activity.

[0013] In one embodiment, the disclosure relates to a composition comprising a Chromobacterium haemolyticum strain JH97285 -1 (NRRL Deposit No. B-67641), wherein the Chromobacterium haemolyticum strain JH97285 -1 has insecticidal activity.

[0014] In one embodiment, the disclosure relates to a composition comprising a Chromobacterium haemolyticum strain PMC3591F10-1 (NRRL Deposit No. B-67643), wherein the Chromobacterium haemolyticum strain PMC3591F10 -1 has insecticidal activity.

[0015] In yet another embodiment, the disclosure relates methods and compositions comprising a bacterial strain disclosed herein, or a progeny, mutant, or variant thereof, a fermentate produced from a strain disclosed herein progeny, mutant, or variant thereof, and/or a depsipeptide in an effective amount to achieve an effect of inhibit growth of a plant pathogen, pest or insect. In some embodiments, the depsipeptide has the structure of FR901375, FK228, or a derivative or variation thereof. In another embodiment, the composition further comprises a biocontrol agent selected from the group consisting of bacteria, fungi, yeast, protozoans, viruses, entomopathogenic nematodes, botanical extracts, proteins, secondary metabolites, and inoculants.

[0016] In another embodiment, the compositions and methods disclosed herein further comprise one or more agrochemically active compounds selected from the group consisting of an insecticide, a fungicide, a bactericide, and a nematicide. In still another embodiment, the composition further comprises a compound selected from the group consisting of a safener, a lipo-chitooligosaccharide, an isoflavone, and a ryanodine receptor modulator.

[0017] In another embodiment, the compositions and methods comprise at least one at least one seed, plant, or plant part. In one embodiment, the seed, plant, or plant part is genetically modified.

[0018] In one embodiment, the compositions and methods inhibit the growth of one or more plant pathogens, pests, or insects including but not limited to bacteria, a fungus, a virus, protozoa, nematode, or an arthropod. In one embodiment, the compositions and methods inhibit the growth of an insect, including but not limited to a Coleopteran, Hemipteran, or Lepidopteran insect. In still another embodiment, the composition inhibits the growth of Diabrotica virgifera virgifera, Ostrinia nubilalis, Spodoptera frugiperda, Pseudoplusia includens, Anticarsia gemmatalis, Plutella xylostella, and/or Aphis fabae.

[0019] In another embodiment, the compositions and methods comprise an effective amount to provide pesticidal activity to bacteria, plants, plant cells, tissues and seeds. In another embodiment, the composition is an effective amount to provide pesticidal activity to Coleopteran or Lepidopteran insects. In still another embodiment, the composition is an effective amount to provide pesticidal activity to Diabrotica virgifera virgifera, Ostrinia nubilalis, Spodoptera frugiperda, Pseudoplusia includens, Anticarsia gemmatalis, Plutella xylostella, and/or Aphis fabae.

[0020] In another embodiment, the compositions and methods comprise in an effective amount to improve plant performance including but not limited to increased root formation, increased root mass, increased root function, increased shoot height, increased shoot function, increased flower bud presence, increased flower bud formation, increased seed germination, increased yield, increased total plant wet weight, and increased total plant dry weight.

[0021] In another embodiment, the disclosure relates to a method comprising applying a composition comprising a bacterial strain disclosed herein, or a progeny, mutant, or variant thereof, a fermentate produced from a strain disclosed herein, or a progeny, mutant, or variant thereof, and/or a depsipeptide to a seed, a plant, plant part or soil in an effective amount to achieve an effect selected from the group consisting of: inhibit a plant pathogen, pest, or insect or to prevent damage to a plant by a pathogen, pest, or insect; improve plant performance; improve plant yield; improve plant vigor; increase phosphate availability; increase production of a plant hormone; increase root formation; increase shoot height in a plant, increase leaf length of a plant; increase flower bud formation of a plant; increase total plant fresh weight; increase total plant dry weight; and increase seed germination.

[0022] In another embodiment, the method further comprises applying a biocontrol agent, wherein the biocontrol agent is selected from the group consisting of bacteria, fungi, yeast, protozoans, viruses, entomopathogenic nematodes, botanical extracts, proteins, secondary metabolites, and inoculants.

[0023] In yet another embodiment, the method further comprises applying an agrochemically active compound selected from the group consisting of an insecticide, a fungicide, a bactericide, and a nematicide. In still another embodiment, the method further comprises applying a compound selected from the group consisting of a safener, a lipo-chitooligosaccharide, an isoflavone, and a ryanodine receptor modulator.

[0024] In another embodiment, the method comprises applying the composition in an effective amount to inhibit growth of a plant pathogen, including but not limited to bacteria, a fungus, a nematode, an insect, a virus, and protozoa.

### DESCRIPTION OF FIGURES

[0025] FIG. 1 shows the depsipeptide structures of FR-901375(1) and FK228 and associated biosynthetic pathways.

[0026] FIG. 2 shows the effect of growth conditions on insecticidal potency in various fermented broths of strain SS532D1 on FAW and WCRW.

[0027] FIG. 3 shows cultures of multiple bacterial strains and their insecticidal activities. Scores are represented as: 2.6-3.0, killing; 1.7-2.5, severe stunting; 1.0-1.6, stunting; 0-0.9 inactive.

[0028] FIG. 4 shows a homology table of A) DepA genes and B) DepB genes from the various strains.

[0029] FIG. 5 shows a homology table of A) DepC genes and B) DepF genes from the various strains.

[0030] FIG. 6 shows a homology table of A) DepG genes and B) DepH genes from the various strains.

[0031] FIG. 7 shows a homology table of A) DepE genes and B) DepD genes from the various strains.

### DESCRIPTION OF THE SEQUENCES

[0032] The disclosure can be more fully understood from the following detailed description and the accompanying drawings and Sequence Listing that form a part of this application.

[0033] The sequence descriptions summarize the Sequence Listing attached hereto, which is hereby incorporated by reference. The Sequence Listing contains one letter codes for nucleotide sequence characters and the single and three letter codes for amino acids as defined in the IUPAC-IUB standards described in Nucleic Acids Research 13:3021-3030 (1985) and in the Biochemical Journal 219(2):345-373 (1984).

TABLE 1
Sequence Listing Description

| Strain_Gene | SEQ ID NO: |
|---|---|
| SSP532D1b_16S | 1 |
| SSP459B9-3_16S | 2 |
| JH59178-1_16S | 3 |
| JH97285-1_16S | 4 |
| JH91791-1_16S | 5 |
| PMC3591F10-1_16S | 6 |
| PMCJ4191H4-1_16S | 7 |
| PMCJ4232B7-1_16S | 8 |
| SSP532D1b_DepA | 9 |
| SSP532D1b_DepB | 10 |
| SSP532D1b_DepC | 11 |
| SSP532D1b_DepD | 12 |
| SSP532D1b_DepE | 13 |
| SSP532D1b_DepF | 14 |
| SSP532D1b_DepG | 15 |
| SSP532D1b_DepH | 16 |
| SSP532D1b_DepI | 17 |
| SSP532D1b_DepJ | 18 |
| SSP532D1b_DepL | 19 |
| SSP532D1b_DepM | 20 |
| SSP459B9-3_DepA | 21 |
| SSP459B9-3_DepB | 22 |
| SSP459B9-3_DepC | 23 |
| SSP459B9-3_DepD | 24 |
| SSP459B9-3_DepE | 25 |
| SSP459B9-3_DepF | 26 |
| SSP459B9-3_DepG | 27 |
| SSP459B9-3_DepH | 28 |
| SSP459B9-3_DepI | 29 |
| SSP459B9-3_DepJ | 30 |
| SSP459B9-3_DepL | 31 |
| SSP459B9-3_DepM | 32 |
| JH59178-1_DepA | 33 |
| JH59178-1_DepB | 34 |
| JH59178-1_DepC | 35 |
| JH59178-1_DepD | 36 |
| JH59178-1_DepE | 37 |
| JH59178-1_DepF | 38 |
| JH59178-1_DepG | 39 |
| JH59178-1_DepH | 40 |
| JH59178-1_DepI | 41 |
| JH59178-1_DepJ | 42 |
| JH59178-1_DepK | 43 |
| JH59178-1_DepM | 44 |
| JH97285-1_DepA | 45 |
| JH97285-1_DepB | 46 |
| JH97285-1_DepC | 47 |
| JH97285-1_DepD | 48 |
| JH97285-1_DepE | 49 |
| JH97285-1_DepF | 50 |
| JH97285-1_DepG | 51 |
| JH97285-1_DepH | 52 |
| JH97285-1_DepI | 53 |
| JH97285-1_DepJ | 54 |
| JH97285-1_DepK | 55 |
| JH97285-1_DepL | 56 |
| JH97285-1_DepM | 57 |
| JH91791-1_DepA | 58 |
| JH91791-1_DepB | 59 |
| JH91791-1_DepC | 60 |
| JH97285-1_DepD | 61 |
| JH91791-1_DepE | 62 |
| JH91791-1_DepF | 63 |
| JH91791-1_DepG | 64 |
| JH91791-1_DepH | 65 |
| JH91791-1_DepI | 66 |
| JH91791-1_DepJ | 67 |
| JH91791-1_DepK | 68 |
| JH91791-1_DepL | 69 |
| JH91791-1_DepM | 70 |
| PMC3591F10-1_DepA | 71 |
| PMC3591F10-1_DepB | 72 |
| PMC3591F10-1_DepC | 73 |
| PMC3591F10-1_DepD | 74 |
| PMC3591F10-1_DepE | 75 |
| PMC3591F10-1_DepF | 76 |
| PMC3591F10-1_DepG | 77 |
| PMC3591F10-1_DepH | 78 |
| PMC3591F10-1_DepI | 79 |
| PMC3591F10-1_DepJ | 80 |
| PMC3591F10-1_DepK | 81 |
| PMC3591F10-1_DepL | 82 |
| PMC3591F10-1_DepM | 83 |
| PMCJ4191H4-1_DepA | 84 |
| PMCJ4191H4-1_DepB | 85 |
| PMCJ4191H4-1_DepC | 86 |
| PMCJ4191H4-1_DepD | 87 |
| PMCJ4191H4-1_DepE | 88 |
| PMCJ4191H4-1_DepF | 89 |
| PMCJ4191H4-1_DepG | 90 |
| PMCJ4191H4-1_DepH | 91 |
| PMCJ4191H4-1_DepI | 92 |
| PMCJ4191H4-1_DepJ | 93 |
| PMCJ4191H4-1_DepK | 94 |
| PMCJ4191H4-1_DepL | 95 |
| PMCJ4191H4-1_DepM | 96 |
| PMCJ4232B7-1_DepA | 97 |
| PMCJ4232B7-1_DepB | 98 |
| PMCJ4232B7-1_DepC | 99 |
| PMCJ4232B7-1_DepD | 100 |
| PMCJ4232B7-1_DepE | 101 |
| PMCJ4232B7-1_DepF | 102 |
| PMCJ4232B7-1_DepG | 103 |
| PMCJ4232B7-1_DepH | 104 |
| PMCJ4232B7-1_DepI | 105 |
| PMCJ4232B7-1_DepJ | 106 |
| PMCJ4232B7-1_DepL | 107 |
| PMCJ4232B7-1_DepM | 108 |

### DETAILED DESCRIPTION

[0034] As used herein the singular forms “a”, “and”, and “the” include plural referents unless the context clearly dictates otherwise. Thus, for example, reference to “a cell” includes a plurality of such cells and reference to “the protein” includes reference to one or more proteins and equivalents thereof, and so forth. All technical and scientific terms used herein have the same meaning as commonly understood to one of ordinary skill in the art to which this disclosure belongs unless clearly indicated otherwise.

[0035] As used herein, “administer” refers to the action of introducing a strain and/or a composition to an environment for pathogen, pest, or insect inhibition or to improve plant performance.

[0036] As used herein, the term “agrochemically active compounds” refers to any substance that is or may be customarily used for treating plants including, but not limited to, fungicides, bactericides, insecticides, acaricides, nematicides, molluscicides, safeners, plant growth regulators, and plant nutrients, as well as, microorganisms.

[0037] As used herein, a composition may be a liquid, a heterogeneous mixture, a homogeneous mixture, a powder, a solution, a dispersion or any combination thereof.

[0038] As used herein, a “depsipeptide” refers to certain cyclic peptide(s) obtained from the fermentation broth of a Pseudomonas chlororaphis strain provided herein. In some embodiments, the depsipeptide has certain biological activity including histone deacetylase inhibitors (HDACi). In some embodiments, the depsipeptide comprises a compound having the structure of FR901375 as shown below.

[chemical structure]

[0039] FR091375 was initially reported in patent application JPH03141296A published in 1991, which subsequently became granted patent JP2833181B2 in 1998, wherein the contents of both are incorporated by reference in their entirety. Although certain anti-cancer activities were reported in these Japanese publications, no HDACi activity of FR901375 was reported until Narita et al., 1996, “Total Synthesis of the Depesipeptide FR901375 and Preliminary Evaluation of its Biological Activity” Eur. J. Chem. 2018, 5667-5677. However, Narita et al. 1996 only shows certain in vitro HDACi activity and there has been no in vivo activity of FR901375 that has been reported today, even twenty-seven years after its initial discovery in 1991.

[0040] In some embodiments, the depsipeptide comprises a compound having the structure of FK228 (also known as FR901228 or romidepsin) as shown below.

[chemical structure]

[0041] FK228 (also known as FR901228 or romidepsin) was initially isolated from Chroinobacterium violaceum and reported in U.S. Pat. No. 4.977.138 titled “FR901228 Substance and Preparation Thereof,” wherein the content of which is incorporated by reference in its entirety. U.S. Pat. No. 4,977,138 only disclosed certain antimicrobial and antitumor activities of FR901228/FK228, and its HDACi activity was reported in Furumai et al., 2002, “FK228 (Depsipeptide) as a Natural Prodrug that Inhibits Class I Histone Deacetylases” Cancer Res. (2002) 62: 4916-4921. Furumai et al. 2002 also discloses chemical modification of FK228 to generate derivatives for example redFK and dimethyl FK228 as shown in Scheme 1 below.

[chemical structure]

[0042] As used herein, “effective amount” refers to a quantity of a bacterial strain disclosed herein, or a progeny, mutant, or variant thereof, a fermentate produced from a strain disclosed herein progeny, mutant, or variant thereof, and/or a depsipeptide sufficient to inhibit growth of a pathogenic microorganism or to impede the rate of growth of the pathogenic microorganism. In another embodiment, the term “effective amount” refers to a quantity of a bacterial strain disclosed herein, or a progeny, mutant, or variant thereof, a fermentate produced from a strain disclosed herein progeny, mutant, or variant thereof, and/or a depsipeptide sufficient to improve plant performance. In another embodiment, the term “effective amount” refers to a quantity of a bacterial strain disclosed herein, or a progeny, mutant, or variant thereof, a fermentate produced from a strain disclosed herein progeny, mutant, or variant thereof, and/or a depsipeptide sufficient to control, kill, inhibit, and reduce the number, emergence, or growth of a pathogen, pest, or insect. In another embodiment, the term “effective amount” refers to a quantity of a bacterial strain disclosed herein, or a progeny, mutant, or variant thereof, a fermentate produced from a strain disclosed herein progeny, mutant, or variant thereof, and/or a depsipeptide sufficient to prevent damage from a pathogen, pest, or insect. One skilled in the art will recognized that an effective amount of a bacterial strain disclosed herein, or a progeny, mutant, or variant thereof, a fermentate produced from a strain disclosed herein progeny, mutant, or variant thereof, and/or a depsipeptide may not reduce the numbers of pathogens, pests or insects, but is effective in decreasing damage to plants and/or plant parts as a result of a pathogen, pest or insect. For example, a pesticidally effective amount may reduce pathogen, pest or insect emergence, or damage to seeds, roots, shoots, or foliage of plants that are treated compared to those that are untreated.

[0043] As used herein, “fermentate broth,” “fermentate,” or “fermented broth” refers to a media used to grow or ferment a bacterial strain disclosed herein. The bacterial strain may be removed from a media by filtration, sterilization, or other means. The leftover broth contains metabolites produced by a bacterial strain disclosed herein, which is collectively referred to as a “fermentate broth,” “fermentate,” or “fermented broth.”

[0044] As used herein, the term “inhibit” refers to destroy, prevent, reduce, resist, control, decrease, slow or otherwise interfere with the growth or survival of a pathogen, pest, or insect when compared to the growth or survival of the pathogen, pest, or insect in an untreated control. Any of the terms of inhibit, destroy, prevent, control, decrease, slow, interfere, resist, or reduce may be used interchangeably. In one embodiment, to “inhibit” is to destroy, prevent, control, reduce, resist, decrease, slow or otherwise interfere with the growth, emergence, or survival of a pathogen, pest, or insect by at least about 3% to at least about 100%, or any value in between for example at least about 10%, 15%, 20%, 25%, 30%, 35%, 40%, 45%, 50%, 55%, 60%, 65%, 70%, 75%, 80%, 85%, 90%, 95%, 99%, or 100% when compared to the growth or survival of the pathogen, pest, or insect in an untreated control. The amount of inhibition can be measured as described herein or by other methods known in the art. As used herein, “protects a plant from a pathogen, pest, or insect pest” is intended to mean the limiting or eliminating of the pathogen, pest, or insect related damage to a plant and/or plant part by, for example, inhibiting the ability of the pathogen, pest, or insect to grow, emerge, feed, and/or reproduce or by killing the pathogen, pest, or insect. As used herein, pesticidal and/or insecticidal activity refers to an activity of compound, composition, and or method that protects a plant and/or plant part from a pathogen, pest, or insect.

[0045] In some embodiments, inhibition a pathogen, pest, or insect lasts for or provides protection for greater than a day, two days, three days, four days, five days, six days, a week, two weeks, three weeks, a month or more after of a bacterial strain disclosed herein, or a progeny, mutant, or variant thereof, a fermentate produced from a strain disclosed herein progeny, mutant, or variant thereof, and/or a depsipeptide disclosed herein is applied to subject material. In another embodiment, inhibition a pathogen, pest or insect lasts from one to seven days, from seven to 14 days, from 14 to 21 days, or from 21 to 30 days or more. In another embodiment, the inhibition of the growth of a pathogen, pest, or insect lasts for or provides protection for greater than the time from application to adult emergence of the pathogen, pest, or insect.

[0046] As used herein, the term “genetically modified” is intended to mean any species containing a genetic trait, loci, or sequence that was not found in the species or strain prior to manipulation. A genetically modified plant may be transgenic, cis-genic, genome edited, or bred to contain a new genetic trait, loci, or sequence. A genetically modified plant or bacteria may be prepared by means known to those skilled in the art, such as transformation by bombardment, by a gene editing technique such as Cas/CRISPR or TALENS, or by breeding techniques. As used herein, a “trait” is a new or modified locus or sequence of a genetically modified plant or bacteria, including but not limited to a transgenic plant or bacteria. In some embodiments, a bacterial strain disclosed herein, or a progeny, mutant, or variant thereof, may be edited. In some embodiments any bacterial strain may be modified or edited to comprise any one of a DepA gene, a DepB gene, a DepC gene, a DepF gene, a DepG gene, DepH gene, a DepE gene, or a DepD gene. In some embodiments, the methods and compositions relate to a insecticidal bacterial strain selected from a group consisting of a DepA gene, a DepB gene, a DepC gene, a DepF gene, a DepG gene, DepH gene, a DepE gene, and a DepD gene

[0047] As used herein, the term “environment of a plant or plant part” is intended to mean the area surrounding the plant or plant part, including but not limited to the soil, the air, or in-furrow. The environment of a plant or plant part may be in close proximity, touching, adjacent to, or in the same field as the plant or plant part. The compositions described herein may be applied to the environment of the plant or plant part as a seed treatment, as a foliar application, as a granular application, as a soil application, or as an encapsulated application. As used herein, “in-furrow” is intended to mean within or near the area where a seed is planted. The compositions disclosed herein may be applied in-furrow concurrently or simultaneously with a seed. In another embodiment, the compositions disclosed herein may be applied sequentially, either before or after a seed is planted.

[0048] As used herein, the term “different mode of action” is used to refer to a pesticidal composition inhibiting a pathogen, pest, or insect through a pathway or receptor that is different from another pesticidal composition. As used herein, the term “different mode of action” includes the pesticidal effects of one or more pesticidal compositions to different binding sites (i.e., different toxin receptors and/or different sites on the same toxin receptor) in the gut membranes of insects or through the RNA interference pathway to different target genes.

[0049] As used herein, the term “pathogen, pest, or insect” includes but is not limited to pathogenic fungi, bacteria, mites, ticks, pathogenic microorganisms, and nematodes, as well as insect from the orders Coleoptera, Lepidoptera, Mallophaga, Homoptera, Hemiptera, Orthroptera, Thysanoptera, Dermaptera, Isoptera, Anoplura, Siphonatpera, Trichoptera, and others, including but not limited to Diabrotica virgifera virgifera, Diabrotica undecimpunctata howardi, and Diabrotica barberi.

[0050] Larvae of the order Lepidoptera include, but are not limited to, armyworms, cutworms, loopers and heliothines in the family Noctuidae Spodoptera frugiperda J E Smith (fall armyworm); S. exigua Hübner (beet armyworm); S. litura Fabricius (tobacco cutworm, cluster caterpillar); Mamestra configurata Walker (bertha armyworm); M. brassicae Linnaeus (cabbage moth); Agrotis ipsilon Hufnagel (black cutworm); A. orthogonia Morrison (western cutworm); A. subterranea Fabricius (granulate cutworm); Alabama argillacea Hübner (cotton leaf worm); Trichoplusia ni Hübner (cabbage looper); Pseudoplusia includens Walker (soybean looper); Anticarsia gemmatalis Hübner (velvetbean caterpillar); Hypena scabra Fabricius (green cloverworm); Heliothis virescens Fabricius (tobacco budworm); Pseudaletia unipuncta Haworth (armyworm); Athetis mindara Barnes and Mcdunnough (rough skinned cutworm); Euxoa messoria Harris (darksided cutworm); Earias insulana Boisduval (spiny bollworm); E. vittella Fabricius (spotted bollworm); Helicoverpa armigera Hübner (American bollworm); H. zea Boddie (corn earworm or cotton bollworm); Melanchra picta Harris (zebra caterpillar); Egira (Xylomyges) curialis Grote (citrus cutworm); borers, casebearers, webworms, coneworms, and skeletonizers from the family Pyralidae Ostrinia nubilalis Hübner (European corn borer); Amyelois transitella Walker (naval orangeworm); Anagasta kuehniella Zeller (Mediterranean flour moth); Cadra cautella Walker (almond moth); Chilo suppressalis Walker (rice stem borer); C. partellus, (sorghum borer); Corcyra cephalonica Stainton (rice moth); Crambus caliginosellus Clemens (corn root webworm); C. teterrellus Zincken (bluegrass webworm); Cnaphalocrocis medinalis Guenëe (rice leaf roller); Desmia funeralis Hübner (grape leaffolder); Diaphania hyalinata Linnaeus (melon worm); D. nitidalis Stoll (pickleworm); Diatraea grandiosella Dyar (southwestern corn borer), D. saccharalis Fabricius (surgarcane borer); Eoreuma loftini Dyar (Mexican rice borer); Ephestia elutella Hübner (tobacco (cacao) moth); Galleria mellonella Linnaeus (greater wax moth); Herpetogramma licarsisalis Walker (sod webworm); Homoeosoma electellum Hulst (sunflower moth); Elasmopalpus lignosellus Zeller (lesser cornstalk borer); Achroia grisella Fabricius (lesser wax moth); Loxostege sticticalis Linnaeus (beet webworm); Orthaga thyrisalis Walker (tea tree web moth); Maruca testulalis Geyer (bean pod borer); Plodia interpunctella Hübner (Indian meal moth); Scirpophaga incertulas Walker (yellow stem borer); Udea rubigalis Guenée (celery leaftier); and leafrollers, budworms, seed worms and fruit worms in the family Tortricidae Acleris gloverana Walsingham (Western blackheaded budworm); A. variana Fernald (Eastern blackheaded budworm); Archips argyrospila Walker (fruit tree leaf roller); A. rosana Linnaeus (European leaf roller); and other Archips species, Adoxophyes orana Fischer von Rösslerstamm (summer fruit tortrix moth); Cochylis hospes Walsingham (banded sunflower moth); Cydia latiferreana Walsingham (filbertworm); C. pomonella Linnaeus (coding moth); Platynota flavedana Clemens (variegated leafroller); P. stultana Walsingham (omnivorous leafroller); Lobesia botrana Denis & Schiffermüller (European grape vine moth); Spilonota ocellana Denis & Schiffermüller (eyespotted bud moth); Endopiza viteana Clemens (grape berry moth); Eupoecilia ambiguella Hübner (vine moth); Bonagota salubricola Meyrick (Brazilian apple leafroller); Grapholita molesta Busck (oriental fruit moth); Suleima helianthana Riley (sunflower bud moth); Argyrotaenia spp.; Choristoneura spp.

[0051] Selected other agronomic pests in the order Lepidoptera include, but are not limited to, Alsophila pometaria Harris (fall cankerworm); Anarsia lineatella Zeller (peach twig borer); Anisota senatoria J. E. Smith (orange striped oakworm); Antheraea pernyi Guérin-Méneville (Chinese Oak Tussah Moth); Bombyx mori Linnaeus (Silkworm); Bucculatrix thurberiella Busck (cotton leaf perforator); Colias eurytheme Boisduval (alfalfa caterpillar); Datana integerrima Grote & Robinson (walnut caterpillar); Dendrolimus sibiricus Tschetwerikov (Siberian silk moth), Ennomos subsignaria Hübner (elm spanworm); Erannis tiliaria Harris (linden looper); Euproctis chrysorrhoea Linnaeus (browntail moth); Harrisina americana Guérin-Méneville (grapeleaf skeletonizer); Hemileuca oliviae Cockrell (range caterpillar); Hyphantria cunea Drury (fall webworm); Keiferia lycopersicella Walsingham (tomato pinworm); Lambdina fiscellaria fiscellaria Hulst (Eastern hemlock looper); L. fiscellaria lugubrosa Hulst (Western hemlock looper); Leucoma salicis Linnaeus (satin moth); Lymantria dispar Linnaeus (gypsy moth); Manduca quinquemaculata Haworth (five spotted hawk moth, tomato hornworm); M. sexta Haworth (tomato hornworm, tobacco hornworm); Operophtera brumata Linnaeus (winter moth); Paleacrita vernata Peck (spring cankerworm); Papilio cresphontes Cramer (giant swallowtail orange dog); Phryganidia californica Packard (California oakworm); Phyllocnistis citrella Stainton (citrus leafminer); Phyllonorycter blancardella Fabricius (spotted tentiform leafminer); Pieris brassicae Linnaeus (large white butterfly); P. rapae Linnaeus (small white butterfly); P. napi Linnaeus (green veined white butterfly); Platyptilia carduidactyla Riley (artichoke plume moth); Plutella xylostella Linnaeus (diamondback moth); Pectinophora gossypiella Saunders (pink bollworm); Pontia protodice Boisduval and Leconte (Southern cabbageworm); Sabulodes aegrotata Guenée (omnivorous looper); Schizura concinna J. E. Smith (red humped caterpillar); Sitotroga cerealella Olivier (Angoumois grain moth); Thaumetopoea pityocampa Schiffermuller (pine processionary caterpillar); Tineola bisselliella Hummel (webbing clothesmoth); Tuta absoluta Meyrick (tomato leafminer); Yponomeuta padella Linnaeus (ermine moth); Heliothis subflexa Guenée; Malacosoma spp. and Orgyia spp.

[0052] Of interest are larvae and adults of the order Coleoptera including weevils from the families Anthribidae, Bruchidae and Curculionidae (including, but not limited to: Anthonomus grandis Boheman (boll weevil); Lissorhoptrus oryzophilus Kuschel (rice water weevil); Sitophilus granarius Linnaeus (granary weevil); S. oryzae Linnaeus (rice weevil); Hypera punctata Fabricius (clover leaf weevil); Cylindrocopturus adspersus LeConte (sunflower stem weevil); Smicronyx fulvus LeConte (red sunflower seed weevil); S. sordidus LeConte (gray sunflower seed weevil); Sphenophorus maidis Chittenden (maize billbug)); flea beetles, cucumber beetles, rootworms, leaf beetles, potato beetles and leafminers in the family Chrysomelidae (including, but not limited to: Leptinotarsa decemlineata Say (Colorado potato beetle); Diabrotica virgifera virgifera LeConte (western corn rootworm); D. barberi Smith and Lawrence (northern corn rootworm); D. undecimpunctata howardi Barber (southern corn rootworm); Chaetocnema pulicaria Melsheimer (corn flea beetle); Phyllotreta cruciferae Goeze (Crucifer flea beetle); Phyllotreta striolata (stripped flea beetle); Colaspis brunnea Fabricius (grape colaspis); Oulema melanopus Linnaeus (cereal leaf beetle); Zygogramma exclamationis Fabricius (sunflower beetle)); beetles from the family Coccinellidae (including, but not limited to: Epilachna varivestis Mulsant (Mexican bean beetle)); chafers and other beetles from the family Scarabaeidae (including, but not limited to: Popillia japonica Newman (Japanese beetle); Cyclocephala borealis Arrow (northern masked chafer, white grub); C. immaculata Olivier (southern masked chafer, white grub); Rhizotrogus majalis Razoumowsky (European chafer); Phyllophaga crinita Burmeister (white grub); Ligyrus gibbosus De Geer (carrot beetle)); carpet beetles from the family Dermestidae; wireworms from the family Elateridae, Eleodes spp., Melanotus spp.; Conoderus spp.; Limonius spp.; Agriotes spp.; Ctenicera spp.; Aeolus spp.; bark beetles from the family Scolytidae and beetles from the family Tenebrionidae.

[0053] Adults and immatures of the order Diptera are of interest, including leafminers Agromyza parvicornis Loew (corn blotch leafminer); midges (including, but not limited to: Contarinia sorghicola Coquillett (sorghum midge); Mayetiola destructor Say (Hessian fly); Sitodiplosis mosellana Géhin (wheat midge); Neolasioptera murtfeldtiana Felt, (sunflower seed midge)); fruit flies (Tephritidae), Oscinella frit Linnaeus (fruit flies); maggots (including, but not limited to: Delia platura Meigen (seedcorn maggot); D. coarctata Fallen (wheat bulb fly) and other Delia spp., Meromyza americana Fitch (wheat stem maggot); Musca domestica Linnaeus (house flies); Fannia canicularis Linnaeus, F. femoralis Stein (lesser house flies); Stomoxys calcitrans Linnaeus (stable flies)); face flies, horn flies, blow flies, Chrysomya spp.; Phormia spp. and other muscoid fly pests, horse flies Tabanus spp.; bot flies Gastrophilus spp.; Oestrus spp.; cattle grubs Hypoderma spp.; deer flies Chrysops spp.; Melophagus ovinus Linnaeus (keds) and other Brachycera, mosquitoes Aedes spp.; Anopheles spp.; Culex spp.; black flies Prosimulium spp.; Simulium spp.; biting midges, sand flies, sciarids, and other Nematocera.

[0054] Included as insects of interest are adults and nymphs of the orders Hemiptera and Homoptera such as, but not limited to, adelgids from the family Adelgidae, plant bugs from the family Miridae, cicadas from the family Cicadidae, leafhoppers, Empoasca spp.; from the family Cicadellidae, planthoppers from the families Cixiidae, Flatidae, Fulgoroidea, Issidae and Delphacidae, treehoppers from the family Membracidae, psyllids from the family Psyllidae, whiteflies from the family Aleyrodidae, aphids from the family Aphididae, phylloxera from the family Phylloxeridae, mealybugs from the family Pseudococcidae, scales from the families Asterolecanidae, Coccidae, Dactylopiidae, Diaspididae, Eriococcidae Ortheziidae, Phoenicococcidae and Margarodidae, lace bugs from the family Tingidae, stink bugs from the family Pentatomidae, cinch bugs, Blissus spp.; and other seed bugs from the family Lygaeidae, spittlebugs from the family Cercopidae squash bugs from the family Coreidae and red bugs and cotton stainers from the family Pyrrhocoridae.

[0055] Agronomically important members from the order Homoptera further include, but are not limited to: Acyrthisiphon pisum Harris (pea aphid); Aphis craccivora Koch (cowpea aphid); A. fabae Scopoli (black bean aphid); A. gossypii Glover (cotton aphid, melon aphid); A. maidiradicis Forbes (corn root aphid); A. pomi De Geer (apple aphid); A. spiraecola Patch (spirea aphid); Aulacorthum solani Kaltenbach (foxglove aphid); Chaetosiphon fragaefolii Cockerell (strawberry aphid); Diuraphis noxia Kurdjumov/Mordvilko (Russian wheat aphid); Dysaphis plantaginea Paaserini (rosy apple aphid); Eriosoma lanigerum Hausmann (woolly apple aphid); Brevicoryne brassicae Linnaeus (cabbage aphid); Hyalopterus pruni Geoffroy (mealy plum aphid); Lipaphis erysimi Kaltenbach (turnip aphid); Metopolophium dirrhodum Walker (cereal aphid); Macrosiphum euphorbiae Thomas (potato aphid); Myzus persicae Sulzer (peach-potato aphid, green peach aphid); Nasonovia ribisnigri Mosley (lettuce aphid); Pemphigus spp. (root aphids and gall aphids); Rhopalosiphum maidis Fitch (corn leaf aphid); R. padi Linnaeus (bird cherry-oat aphid); Schizaphis graminum Rondani (greenbug); Sipha flava Forbes (yellow sugarcane aphid); Sitobion avenae Fabricius (English grain aphid); Therioaphis maculata Buckton (spotted alfalfa aphid); Toxoptera aurantii Boyer de Fonscolombe (black citrus aphid) and T. citricida Kirkaldy (brown citrus aphid); Melanaphis sacchari (sugarcane aphid); Adelges spp. (adelgids); Phylloxera devastatrix Pergande (pecan phylloxera); Bemisia tabaci Gennadius (tobacco whitefly, sweetpotato whitefly); B. argentifolii Bellows & Perring (silverleaf whitefly); Dialeurodes citri Ashmead (citrus whitefly); Trialeurodes abutiloneus (bandedwinged whitefly) and T. vaporariorum Westwood (greenhouse whitefly); Empoasca fabae Harris (potato leafhopper); Laodelphax striatellus Fallen (smaller brown planthopper); Macrolestes quadrilineatus Forbes (aster leafhopper); Nephotettix cinticeps Uhler (green leafhopper); N. nigropictus Stål (rice leafhopper); Nilaparvata lugens Stål (brown planthopper); Peregrinus maidis Ashmead (corn planthopper); Sogatella furcifera Horvath (white-backed planthopper); Sogatodes orizicola Muir (rice delphacid); Typhlocyba pomaria McAtee (white apple leafhopper); Erythroneoura spp. (grape leafhoppers); Magicicada septendecim Linnaeus (periodical cicada); Icerya purchasi Maskell (cottony cushion scale); Quadraspidiotus perniciosus Comstock (San Jose scale); Planococcus citri Risso (citrus mealybug); Pseudococcus spp. (other mealybug complex); Cacopsylla pyricola Foerster (pear psylla); Trioza diospyri Ashmead (persimmon psylla).

[0056] Agronomically important species of interest from the order Hemiptera include, but are not limited to: Acrosternum hilare Say (green stink bug); Anasa tristis De Geer (squash bug); Blissus leucopterus leucopterus Say (chinch bug); Corythuca gossypii Fabricius (cotton lace bug); Cyrtopeltis modesta Distant (tomato bug); Dysdercus suturellus Herrich-Schäffer (cotton stainer); Euschistus servus Say (brown stink bug); E. variolarius Palisot de Beauvois (one-spotted stink bug); Graptostethus spp. (complex of seed bugs); Leptoglossus corculus Say (leaf-footed pine seed bug); Lygus lineolaris Palisot de Beauvois (tarnished plant bug); L. hesperus Knight (Western tarnished plant bug); L. pratensis Linnaeus (common meadow bug); L. rugulipennis Poppius (European tarnished plant bug); Lygocoris pabulinus Linnaeus (common green capsid); Nezara viridula Linnaeus (southern green stink bug); Oebalus pugnax Fabricius (rice stink bug); Oncopeltus fasciatus Dallas (large milkweed bug); Pseudatomoscelis seriatus Reuter (cotton fleahopper).

[0057] Furthermore, embodiments may be effective against Hemiptera such, Calocoris norvegicus Gmelin (strawberry bug); Orthops campestris Linnaeus; Plesiocoris rugicollis Fallen (apple capsid); Cyrtopeltis modestus Distant (tomato bug); Cyrtopeltis notatus Distant (suckfly); Spanagonicus albofasciatus Reuter (whitemarked fleahopper); Diaphnocoris chlorionis Say (honeylocust plant bug); Labopidicola allii Knight (onion plant bug); Pseudatomoscelis seriatus Reuter (cotton fleahopper); Adelphocoris rapidus Say (rapid plant bug); Poecilocapsus lineatus Fabricius (four-lined plant bug); Nysius ericae Schilling (false chinch bug); Nysius raphanus Howard (false chinch bug); Nezara viridula Linnaeus (Southern green stink bug); Eurygaster spp.; Coreidae spp.; Pyrrhocoridae spp.; Tinidae spp.; Blostomatidae spp.; Reduviidae spp. and Cimicidae spp.

[0058] Also included are adults and larvae of the order Acari (mites) such as Aceria tosichella Keifer (wheat curl mite); Petrobia latens Müller (brown wheat mite); spider mites and red mites in the family Tetranychidae, Panonychus ulmi Koch (European red mite); Tetranychus urticae Koch (two spotted spider mite); (T. mcdanieli McGregor (McDaniel mite); T. cinnabarinus Boisduval (carmine spider mite); T. turkestani Ugarov & Nikolski (strawberry spider mite); flat mites in the family Tenuipalpidae, Brevipalpus lewisi McGregor (citrus flat mite); rust and bud mites in the family Eriophyidae and other foliar feeding mites and mites important in human and animal health, i.e., dust mites in the family Epidermoptidae, follicle mites in the family Demodicidae, grain mites in the family Glycyphagidae, ticks in the order Ixodidae. Ixodes scapularis Say (deer tick); I. holocyclus Neumann (Australian paralysis tick); Dermacentor variabilis Say (American dog tick); Amblyomma americanum Linnaeus (lone star tick) and scab and itch mites in the families Psoroptidae, Pyemotidae and Sarcoptidae.

[0059] Insect pests of the order Thysanura are of interest, such as Lepisma saccharina Linnaeus (silverfish); Thermobia domestica Packard (firebrat).

[0060] Additional arthropod pests covered include: spiders in the order Araneae such as Loxosceles reclusa Gertsch and Mulaik (brown recluse spider) and the Latrodectus mactans Fabricius (black widow spider) and centipedes in the order Scutigeromorpha such as Scutigera coleoptrata Linnaeus (house centipede).

[0061] Insect pest of interest include the superfamily of stink bugs and other related insects including but not limited to species belonging to the family Pentatomidae (Nezara viridula, Halyomorpha halys, Piezodorus guildini, Euschistus servus, Acrosternum hilare, Euschistus heros, Euschistus tristigmus, Acrosternum hilare, Dichelops furcatus, Dichelops melacanthus, and Bagrada hilaris (Bagrada Bug)), the family Plataspidae (Megacopta cribraria—Bean plataspid) and the family Cydnidae (Scaptocoris castanea—Root stink bug) and Lepidoptera species including but not limited to: diamond-back moth, e.g., Helicoverpa zea Boddie; soybean looper, e.g., Pseudoplusia includens Walker and velvet bean caterpillar e.g., Anticarsia gemmatalis Hübner.

[0062] Methods for measuring pesticidal activity are well known in the art. See, for example, Czapla and Lang, (1990) J. Econ. Entomol. 83:2480-2485; Andrews, et al., (1988) Biochem. J. 252:199-206; Marrone, et al., (1985) J. of Economic Entomology 78:290-293 and U.S. Pat. No. 5,743,477. Generally, the pesticide is mixed and used in feeding assays. See, for example Marrone, et al., (1985) J. of Economic Entomology 78:290-293. Such assays can include contacting plants with one or more pests and determining the plant's ability to survive and/or cause the death of the pests.

[0063] “Percent (%) sequence identity” with respect to a reference sequence (subject) is determined as the percentage of amino acid residues or nucleotides in a candidate sequence (query) that are identical with the respective amino acid residues or nucleotides in the reference sequence, after aligning the sequences and introducing gaps, if necessary, to achieve the maximum percent sequence identity, and not considering any amino acid conservative substitutions as part of the sequence identity. Alignment for purposes of determining percent sequence identity can be achieved in various ways that are within the skill in the art, for instance, using publicly available computer software such as BLAST, BLAST-2. Those skilled in the art can determine appropriate parameters for aligning sequences, including any algorithms needed to achieve maximal alignment over the full length of the sequences being compared. The percent identity between the two sequences is a function of the number of identical positions shared by the sequences (e.g., percent identity of query sequence=number of identical positions between query and subject sequences/total number of positions of query sequence×100).

[0064] In some embodiments, a depsipeptide biosynthesis gene polypeptide comprises an amino acid sequence having at least about 80%, 81%, 82%, 83%, 84%, 85%, 86%, 87%, 88%, 89%, 90%, 91%, 92%, 93%, 94%, 95%, 96%, 97%, 98%, 99% or greater identity across the entire length of the amino acid sequence of any one of SEQ ID NOs: 109-208. In some embodiments, a nucleic acid sequence encoding a depsipeptide biosynthesis gene polypeptide comprises an polynucletoide sequence having at least about 80%, 81%, 82%, 83%, 84%, 85%, 86%, 87%, 88%, 89%, 90%, 91%, 92%, 93%, 94%, 95%, 96%, 97%, 98%, 99% or greater identity across the entire length of the amino acid sequence of any one of SEQ ID NOs: 9-108.

[0065] As used herein, the term “plant” refers to all plants, plant parts, seed, and plant populations, such as desirable and undesirable wild plants, cultivars, transgenic plants, and plant varieties (whether or not protectable by plant variety or plant breeder's rights). Cultivars and plant varieties can be plants obtained by conventional propagation and breeding methods that can be assisted or supplemented by one or more biotechnological methods such as by use of double haploids, protoplast fusion, random and directed mutagenesis, molecular or genetic markers or by bioengineering and genetic engineering methods.

[0066] The embodiments disclosed herein may generally be used for any plant species, including, but not limited to, monocots and dicots. Examples of plants of interest include, but are not limited to, corn (Zea mays), Brassica sp. (e.g., B. napus, B. rapa, B. juncea), particularly those Brassica species useful as sources of seed oil, alfalfa (Medicago sativa), rice (Oryza sativa), rye (Secale cereale), sorghum (Sorghum bicolor, Sorghum vulgare), millet (e.g., pearl millet (Pennisetum glaucum), proso millet (Panicum miliaceum), foxtail millet (Setaria italica), finger millet (Eleusine coracana)), sunflower (Helianthus annuus), safflower (Carthamus tinctorius), wheat (Triticum aestivum), soybean (Glycine max), tobacco (Nicotiana tabacum), potato (Solanum tuberosum), peanuts (Arachis hypogaea), cotton (Gossypium barbadense, Gossypium hirsutum), sweet potato (Ipomoea batatus), cassava (Manihot esculenta), coffee (Coffea spp.), coconut (Cocos nucifera), pineapple (Ananas comosus), citrus trees (Citrus spp.), cocoa (Theobroma cacao), tea (Camellia sinensis), banana (Musa spp.), avocado (Persea americana), fig (Ficus casica), guava (Psidium guajava), mango (Mangifera indica), olive (Olea europaea), papaya (Carica papaya), cashew (Anacardium occidentale), macadamia (Macadamia integrifolia), almond (Prunus amygdalus), sugar beets (Beta vulgaris), sugarcane (Saccharum spp.), oats, barley, vegetables ornamentals, and conifers.

[0067] As used herein, the term “plant parts” refers to all above ground and below ground parts and organs of plants such as shoot, leaf, blossom and root, whereby for example leaves, needles, stems, branches, blossoms, fruiting bodies, fruits and seeds, as well as roots, tubers, corms and rhizomes are included. Crops and vegetative and generative propagating material, for example, cuttings, corms, rhizomes, tubers, runners and seeds are also plant parts.

[0068] As used herein, the term “viable” refers to a microbial cell, propagule, or spore that is metabolically active or able to differentiate. Thus, propagules, such as spores, are “viable” when they are dormant and capable of germinating.

[0069] The embodiments disclosed herein relate to a Pseudomonas chlororaphis strain SS532D1 (NRRL Deposit No. B-67638), a Pseudomonas chlororaphis strain SSP459B9-3 (NRRL Deposit No. B-67639), a Burkholderia rinojensis strain JH59178-1 (NRRL Deposit No. B-67640), a Chromobacterium haemolyticum strain JH91791-1 (NRRL Deposit No. B-67642), a Chromobacterium haemolyticum strain PMCJ4191H4-1 (NRRL Deposit No. B-67644), a Chromobacterium haemolyticum strain JH97285-1 (NRRL Deposit No. B-67641), or a Chromobacterium haemolyticum strain PMC3591F10-1 (NRRL Deposit No. B-67643); a fermentate produced from a growth medium comprising a Pseudomonas chlororaphis strain SS532D1 (NRRL Deposit No. B-67638), a Pseudomonas chlororaphis strain SSP459B9-3 (NRRL Deposit No. B-67639), a Burkholderia rinojensis strain JH59178-1 (NRRL Deposit No. B-67640), a Chromobacterium haemolyticum strain JH91791-1 (NRRL Deposit No. B-67642), a Chromobacterium haemolyticum strain PMCJ4191H4-1 (NRRL Deposit No. B-67644), a Chromobacterium haemolyticum strain JH97285-1 (NRRL Deposit No. B-67641), or a Chromobacterium haemolyticum strain PMC3591F10-1 (NRRL Deposit No. B-67643), and/or a depsipeptide in an effective amount to achieve an effect of inhibit growth of a plant pathogen, pest or insect. In one embodiment the bacterial strain disclosed herein, or a progeny, mutant, or variant thereof; fermentate produced from a strain disclosed herein progeny, mutant, or variant thereof; and/or depsipeptide compositions and methods find use in inhibiting, controlling, or killing a pathogen, pest, or insect, including, but is not limited to, fungi, pathogenic fungi, bacteria, mites, ticks, pathogenic microorganisms, and nematodes, as well as insects from the orders Coleoptera, Diptera, Hymenoptera, Lepidoptera, Mallophaga, Homoptera, Hemiptera Orthroptera, Thysanoptera, Dermaptera, Isoptera, Anoplura, Siphonaptera, Trichoptera, etc., particularly Coleoptera, including but not limited to Diabrotica virgifera virgifera, Diabrotica undecimpunctata howardi, and Diabrotica barberi, and for producing compositions with pesticidal activity.

[0070] The Pseudomonas chlororaphis strain SS532D1 (NRRL Deposit No. B-67638), Pseudomonas chlororaphis strain SSP459B9-3 (NRRL Deposit No. B-67639), Burkholderia rinojensis strain JH59178-1 (NRRL Deposit No. B-67640), Chromobacterium haemolyticum strain JH91791-1 (NRRL Deposit No. B-67642), Chromobacterium haemolyticum strain PMCJ4191H4-1 (NRRL Deposit No. B-67644), Chromobacterium haemolyticum strain JH97285-1 (NRRL Deposit No. B-67641), and Chromobacterium haemolyticum strain PMC3591F10-1 (NRRL Deposit No. B-67643) were deposited on Jul. 20, 2018 at the Agricultural Research Service Culture Collection (NRRL), 1815 North University Street, Peoria, Ill., 61604. The deposits were made under the provisions of the Budapest Treaty on the International Recognition of the Deposit of Microorganisms for the Purposes of Patent Procedure. Further, these deposits will be maintained under the terms of the Budapest Treaty on the International Recognition of the Deposit of Microorganisms for the Purposes of Patent Procedure. Access to these deposits will be available during the pendency of the application to the Commissioner of Patents and Trademarks and persons determined by the Commissioner to be entitled thereto upon request. Upon allowance of any claims in the application, the Applicant will make available to the public, pursuant to 37 C.F.R. § 1.808, sample(s) of the deposits. The deposits will be maintained in the NRRL depository, which is a public depository, for a period of 30 years, or 5 years after the most recent request, or for the enforceable life of the patent, whichever is longer, and will be replaced if it becomes nonviable during that period. Additionally, Applicant has satisfied all the requirements of 37 C.F.R. §§ 1.801-1.809, including providing an indication of the viability of the sample upon deposit.

[0071] Some embodiments relate to compositions comprising or consisting of or consisting essentially of a bacterial strain disclosed herein, or a progeny, mutant, or variant thereof, a fermentate produced from a strain disclosed herein progeny, mutant, or variant thereof, and/or a depsipeptide. In one embodiment, the compositions are biologically pure cultures of the strain disclosed herein.

[0072] Some embodiments relate to a composition comprising a bacterial strain disclosed herein, or a progeny, mutant, or variant thereof, a fermentate produced from a strain disclosed herein progeny, mutant, or variant thereof, and/or a depsipeptide disclosed herein and one or more compounds or agents selected from the group consisting of: agrochemically active compounds, biocontrol agents, lipo-chitooligosaccharide compounds (LCOs), isoflavones, quinazolines, insecticidal compounds, azolopyrimidinylamines, polymeric compounds, ionic compound, substituted thiophenes, substituted dithiines, fluopyramm, enaminocarbonyl compounds, strigolactone compound, and dithiino-tetracarboximide compounds.

[0073] A further embodiment relates to the use of a first composition comprising a bacterial strain disclosed herein, or a progeny, mutant, or variant thereof, a fermentate produced from a strain disclosed herein progeny, mutant, or variant thereof, and/or a depsipeptide disclosed herein and a second composition comprising one or more compounds or agents selected from the group consisting of: agrochemically active compounds, biocontrol agents, lipo-chitooligosaccharide compounds (LCOs), isoflavones, quinazolines, insecticidal compound, azolopyrimidinylamine, polymeric compounds, ionic compound, substituted thiophenes, substituted dithiines, fluopyramm, enaminocarbonyl compounds, strigolactone compound, and dithiino-tetracarboximide compounds.

[0074] In one embodiment, the disclosure relates to a composition comprising a bacterial strain disclosed herein, or a progeny, mutant, or variant thereof, a fermentate produced from a strain disclosed herein progeny, mutant, or variant thereof, and/or a depsipeptide disclosed herein and one or more biocontrol agents, As used herein, the term “biocontrol agent” (“BCA”) includes bacteria, fungi or yeasts, protozoans, viruses, entomopathogenic nematodes, and botanical extracts, or products produced by microorganisms including proteins or secondary metabolite, and inoculants that have one or both of the following characteristics: (1) inhibits or reduces plant infestation and/or growth of pathogens, pests, or insects, including but not limited to pathogenic fungi, bacteria, and nematodes, as well as arthropod pests such as insects, arachnids, chilopods, diplopods, or that inhibits plant infestation and/or growth of a combination of plant pathogens, pests, or insects; (2) improves plant performance; (3) improves plant yield; (4) improves plant vigor; and (5) improves plant health.

[0075] In one embodiment, the disclosure relates to a composition comprising a bacterial strain disclosed herein, or a progeny, mutant, or variant thereof, a fermentate produced from a strain disclosed herein progeny, mutant, or variant thereof, and/or a depsipeptide disclosed herein and one or more agrochemically active compounds. Agrochemically active compounds are substances that are or may be used for treating a seed, a plant, plant part, or the environment of the seed or plant or plant part including but not limited to fungicides, bactericides, insecticides, acaricides, nematicides, molluscicides, safeners, plant growth regulators, plant nutrients, chemical entities with a known mechanism of action, additional microorganisms, and biocontrol agents.

[0076] In another embodiment, the disclosure relates to a first composition comprising a bacterial strain disclosed herein, or a progeny, mutant, or variant thereof, a fermentate produced from a strain disclosed herein progeny, mutant, or variant thereof, and/or a depsipeptide and a second composition comprising one or more agrochemically active compounds, wherein the first and second composition may inhibit plant pathogens, pests, or insects and/or improve plant performance.

[0077] In one embodiment, the first and second compositions can be applied at the same time to a seed, a plant, plant part, or the environment of the plant. In another embodiment, the first composition can be applied to the seed followed by application of the second composition to the seed. In yet another embodiment, the second composition can be applied to the seed followed by application of the first composition to the seed.

[0078] In another embodiment, the first composition can be applied to the plant or plant part followed by application of the second composition to the plant or plant part. In yet another embodiment, the second composition can be applied to the plant or plant part followed by application of the first composition to the plant or plant part.

[0079] In another embodiment, the first composition can be applied to the seed and the second composition applied to the plant or plant part, In yet another embodiment, the second composition can be applied to the seed and the first composition applied to the plant or plant part.

[0080] In another embodiment, the first composition may be planted on or near the seed in a field. In yet another embodiment, the second composition can be applied to the seed and the first composition applied to the plant or plant part.

[0081] In one embodiment, the disclosure relates to the use of a bacterial strain disclosed herein, or a progeny, mutant, or variant thereof, a fermentate produced from a strain disclosed herein progeny, mutant, or variant thereof, and/or a depsipeptide disclosed herein with a composition comprising an insecticidal protein from Pseudomonas sp. such as PSEEN3174 (Monalysin; (2011) PLoS Pathogens 7:1-13); from Pseudomonas protegens strain CHA0 and Pf-5 (previously fluorescens) (Pechy-Tarr, (2008) Environmental Microbiology 10:2368-2386; GenBank Accession No. EU400157); from Pseudomonas Taiwanensis (Liu, et al., (2010) J. Agric. Food Chem., 58:12343-12349) and from Pseudomonas pseudoalcligenes (Zhang, et al., (2009) Annals of Microbiology 59:45-50 and Li, et al., (2007) Plant Cell Tiss. Organ Cult. 89:159-168); insecticidal proteins from Photorhabdus sp. and Xenorhabdus sp. (Hinchliffe, et al., (2010) The Open Toxicology Journal, 3:101-118 and Morgan, et al., (2001) Applied and Envir. Micro. 67:2062-2069); U.S. Pat. Nos. 6,048,838, and 6,379,946; a PIP-1 polypeptide of U.S. Pat. No. 9,688,730; an AfIP-1A and/or AfIP-1B polypeptide of U.S. Pat. No. 9,475,847; a PIP-47 polypeptide of US Publication Number US20160186204; an IPD045 polypeptide, an IPD064 polypeptide, an IPD074 polypeptide, an IPD075 polypeptide, and an IPD077 polypeptide of PCT Publication Number WO 2016/114973; an IPD080 polypeptide of PCT Serial Number PCT/US17/56517; an IPD078 polypeptide, an IPD084 polypeptide, an IPD085 polypeptide, an IPD086 polypeptide, an IPD087 polypeptide, an IPD088 polypeptide, and an IPD089 polypeptide of Serial Number PCT/US17/54160; PIP-72 polypeptide of US Patent Publication Number US20160366891; a PtIP-50 polypeptide and a PtIP-65 polypeptide of US Publication Number US20170166921; an IPD098 polypeptide, an IPD059 polypeptide, an IPD108 polypeptide, an IPD109 polypeptide of U.S. Ser. No. 62/521,084; a PtIP-83 polypeptide of US Publication Number US20160347799; a PtIP-96 polypeptide of US Publication Number US20170233440; an IPD079 polypeptide of PCT Publication Number WO2017/23486; an IPD082 polypeptide of PCT Publication Number WO 2017/105987, an IPD090 polypeptide of Serial Number PCT/US17/30602, an IPD093 polypeptide of U.S. Ser. No. 62/434,020; an IPD103 polypeptide of Serial Number PCT/US17/39376; an IPD101 polypeptide of U.S. Ser. No. 62/438,179; an IPD121 polypeptide of US Serial Number U.S. 62/508,514; and δ-endotoxins including, but not limited to, the Cry1, Cry2, Cry3, Cry4, Cry5, Cry6, Cry7, Cry8, Cry9, Cry10, Cry11, Cry12, Cry13, Cry14, Cry15, Cry16, Cry17, Cry18, Cry19, Cry20, Cry21, Cry22, Cry23, Cry24, Cry25, Cry26, Cry27, Cry 28, Cry 29, Cry 30, Cry31, Cry32, Cry33, Cry34, Cry35,Cry36, Cry37, Cry38, Cry39, Cry40, Cry41, Cry42, Cry43, Cry44, Cry45, Cry 46, Cry47, Cry49, Cry 51 and Cry55 classes of δ-endotoxin genes and the B. thuringiensis cytolytic Cyt1 and Cyt2 genes. Other Cry proteins are well known to one skilled in the art (see, Crickmore, et al., “Bacillus thuringiensis toxin nomenclature” (2011), at lifesci.sussex.ac.uk/home/Neil_Crickmore/Bt/ which can be accessed on the world-wide web using the “www” prefix). The insecticidal activity of Cry proteins is well known to one skilled in the art (for review, see, van Frannkenhuyzen, (2009) J. Invert. Path. 101:1-16).

[0082] In one embodiment the composition comprises a silencing element of one or more polynucleotides of interest resulting in suppression of one or more target pathogen, pest, or insect polypeptides. By “silencing element” is it intended to mean a polynucleotide which when contacted by or ingested by a pest, is capable of reducing or eliminating the level or expression of a target polynucleotide or the polypeptide encoded thereby. The silencing element employed can reduce or eliminate the expression level of the target sequence by influencing the level of the target RNA transcript or, alternatively, by influencing translation and thereby affecting the level of the encoded polypeptide. Silencing elements may include, but are not limited to, a sense suppression element, an antisense suppression element, a double stranded RNA, a siRNA, an amiRNA, a miRNA, or a hairpin suppression element.

[0083] Nucleic acid molecules including silencing elements for targeting the vacuolar ATPase H subunit, useful for controlling a coleopteran pest population and infestation as described in US Patent Application Publication 2012/0198586. PCT Publication WO 2012/055982 describes ribonucleic acid (RNA or double stranded RNA) that inhibits or down regulates the expression of a target gene that encodes: an insect ribosomal protein such as the ribosomal protein L19, the ribosomal protein L40 or the ribosomal protein S27A; an insect proteasome subunit such as the Rpn6 protein, the Pros 25, the Rpn2 protein, the proteasome beta 1 subunit protein or the Pros beta 2 protein; an insect β-coatomer of the COPI vesicle, the γ-coatomer of the COPI vesicle, the β′-coatomer protein or the ζ-coatomer of the COPI vesicle; an insect Tetraspanine 2 A protein which is a putative transmembrane domain protein; an insect protein belonging to the actin family such as Actin 5C; an insect ubiquitin-5E protein; an insect Sec23 protein which is a GTPase activator involved in intracellular protein transport; an insect crinkled protein which is an unconventional myosin which is involved in motor activity; an insect crooked neck protein which is involved in the regulation of nuclear alternative mRNA splicing; an insect vacuolar H+-ATPase G-subunit protein and an insect Tbp-1 such as Tat-binding protein. PCT publication WO 2007/035650 describes ribonucleic acid (RNA or double stranded RNA) that inhibits or down regulates the expression of a target gene that encodes Snf7. US Patent Application publication 2011/0054007 describes polynucleotide silencing elements targeting RPS10. US Patent Application publication 2014/0275208 describes polynucleotide silencing elements targeting RyanR and PAT3. US Patent Application Publications 2012/029750, US 20120297501, and 2012/0322660 describe interfering ribonucleic acids (RNA or double stranded RNA) that functions upon uptake by an insect pest species to down-regulate expression of a target gene in said insect pest, wherein the RNA comprises at least one silencing element wherein the silencing element is a region of double-stranded RNA comprising annealed complementary strands, one strand of which comprises or consists of a sequence of nucleotides which is at least partially complementary to a target nucleotide sequence within the target gene. US Patent Application Publication 2012/0164205 describe potential targets for interfering double stranded ribonucleic acids for inhibiting invertebrate pests including: a Chd3 Homologous Sequence, a Beta-Tubulin Homologous Sequence, a 40 kDa V-ATPase Homologous Sequence, a EF1α Homologous Sequence, a 26S Proteosome Subunit p28 Homologous Sequence, a Juvenile Hormone Epoxide Hydrolase Homologous Sequence, a Swelling Dependent Chloride Channel Protein Homologous Sequence, a Glucose-6-Phosphate 1-Dehydrogenase Protein Homologous Sequence, an Act42A Protein Homologous Sequence, a ADP-Ribosylation Factor 1 Homologous Sequence, a Transcription Factor IIB Protein Homologous Sequence, a Chitinase Homologous Sequences, a Ubiquitin Conjugating Enzyme Homologous Sequence, a Glyceraldehyde-3-Phosphate Dehydrogenase Homologous Sequence, an Ubiquitin B Homologous Sequence, a Juvenile Hormone Esterase Homolog, and an Alpha Tubulin Homologous Sequence.

[0084] Some embodiments comprise an additional component, which may be a carrier, an adjuvant, a solubilizing agent, a suspending agent, a diluent, an oxygen scavenger, an antioxidant, a food material, an anti-contaminant agent, or combinations thereof.

[0085] In another embodiment, the additional component(s) may be required for the application to which the strain or composition is to be utilized. For example, if the strain or composition is to be utilized on, or in, an agricultural product, the additional component(s) may be an agriculturally acceptable carrier, excipient, or diluent. Likewise, if the strain or composition is to be utilized on, or in, a foodstuff the additional component(s) may be an edible carrier, excipient or diluent.

[0086] In one aspect, the one or more additional component(s) is a carrier, excipient, or diluent. “Carriers” or “vehicles” mean materials suitable for compound administration and include any such material known in the art such as, for example, any liquid, gel, solvent, liquid diluent, solubilizer, or the like, which is non-toxic and does not interact with any components of the composition in a deleterious manner.

[0087] Examples of nutritionally acceptable carriers include, for example, water, salt solutions, alcohol, silicone, waxes, petroleum jelly, vegetable oils, polyethylene glycols, propylene glycol, liposomes, sugars, gelatin, lactose, amylose, magnesium stearate, talc, surfactants, silicic acid, viscous paraffin, perfume oil, fatty acid monoglycerides and diglycerides, petroethral fatty acid esters, hydroxymethyl-cellulose, polyvinylpyrrolidone, and the like.

[0088] Examples of excipients include but are not limited to: microcrystalline cellulose and other celluloses, lactose, sodium citrate, calcium carbonate, dibasic calcium phosphate, glycine, starch, milk sugar, and high molecular weight polyethylene glycols.

[0089] Examples of diluents include but are not limited to: water, ethanol, propylene glycol and glycerin, and combinations thereof.

[0090] The other components may be used simultaneously (e.g. when they are in admixture together or even when they are delivered by different routes) or sequentially (e.g. they may be delivered by different routes).

[0091] The composition or its diluent may also contain chelating agents such as EDTA, citric acid, tartaric acid, etc. Moreover, the composition or its diluent may contain active agents selected from fatty acids esters, such as mono-and diglycerides, non-ionic surfactants, such as polysorbates, phospholipids, etc. Emulsifiers may enhance the stability of the composition, especially after dilution.

[0092] The bacterial strain disclosed herein, or a progeny, mutant, or variant thereof, a fermentate produced from a strain disclosed herein progeny, mutant, or variant thereof, and/or a depsipeptide may be used in any suitable form—whether when alone or when present in a composition. The compositions may be formulated in any suitable way to ensure that the composition comprises an active compound(s) of interest.

[0093] The bacterial strain disclosed herein, or a progeny, mutant, or variant thereof, a fermentate produced from a strain disclosed herein progeny, mutant, or variant thereof, and/or a depsipeptide compositions thereof may be in the form of a dry powder that can be sprinkled on or mixed in with a product. The compositions in the form of a dry powder may include an additive such as microcrystalline cellulose, gum tragacanth, gelatin, starch, lactose, alginic acid, Primogel, or corn starch (which can be used as a disintegrating agent).

[0094] In yet another embodiment, a bacterial strain disclosed herein, or a progeny, mutant, or variant thereof, a fermentate produced from a strain disclosed herein progeny, mutant, or variant thereof, and/or a depsipeptide compositions disclosed herein can be a spray-dried fermentate re-suspended in H₂O to a percentage selected from the following: 0.05-1, 1-3, 3-5, 5-7, 7-10, 10-15, 15-20, and greater than 20%. In another embodiment, one or more than one clarification step(s) can be performed prior to spray-drying.

[0095] In one embodiment, the compositions disclosed herein can comprise concentrated, dried propagules, from the strain disclosed herein. In one embodiment, compositions can be in the range of 1×10³ to 1×10¹³ CFU/g.

[0096] In one embodiment, the compositions disclosed herein can be applied in wet or partially or completely desiccated form or in slurry, gel, or other form.

[0097] In at least some embodiments, the compositions disclosed herein can be freeze-dried or lypholized. In at least some embodiments, the compositions can be mixed with a carrier. The carrier includes but is not limited to whey, maltodextrin, sucrose, dextrose, limestone (calcium carbonate), rice hulls, yeast culture, dried starch, clay, and sodium silico aluminate. The compositions can also be used with or without preservatives and in concentrated, un-concentrated, or diluted form. In one embodiment, the compositions can be in the form of a pellet or a biologically pure pellet.

[0098] The compositions described herein can be added to one or more carrier. Where used, the carrier(s) and the compositions can be added to a ribbon or paddle mixer and mixed for about 15 minutes, although the timing can be increased or decreased. The components are blended such that a uniform mixture of the culture and carrier(s) is produced. The final product is preferably a dry, flowable powder.

[0099] In one embodiment, the compositions may be formulated as a liquid, a dry powder, or a granule. The dry powder or granules may be prepared by means known to those skilled in the art, such as, in top-spray fluid bed coater, in a bottom spray Wurster, or by drum granulation (e.g. high sheer granulation), extrusion, pan coating or in a micro-ingredients mixer.

[0100] In another embodiment, the compositions disclosed herein may be provided as a spray-dried or freeze-dried powder.

[0101] In yet another embodiment, the compositions are in a liquid formulation. Such liquid consumption may contain one or more of the following: a buffer, salt, sorbitol, and/or glycerol.

[0102] In one embodiment, the compositions disclosed herein may be formulated with at least one physiologically acceptable carrier selected from at least one of maltodextrin, calcined (illite) clay, limestone (calcium carbonate), cyclodextrin, wheat or a wheat component, sucrose, starch, Na₂SO₄, Talc, PVA, sorbitol, benzoate, sorbiate, glycerol, sucrose, propylene glycol, 1,3-propane diol, glucose, parabens, sodium chloride, citrate, acetate, phosphate, calcium, metabisulfite, formate and mixtures thereof.

[0103] In one embodiment, the compositions disclosed herein may be formulated by encapsulation technology to improve stability and as a way to protect the compositions from seed applications. In one embodiment the encapsulation technology may comprise a bead polymer for timed release of the compositions over time. In one embodiment, the encapsulated compositions may be applied in a separate application of beads in-furrow to the seeds. In another embodiment, the encapsulated compositions may be co-applied along with seeds simultaneously.

[0104] The coating agent usable for the sustained release microparticles of an encapsulation embodiment may be a substance which is useful for coating the microgranular form with the substance to be supported thereon. Any coating agent which can form a coating difficultly permeable for the supported substance may be used in general, without any particular limitation. For example, higher saturated fatty acid, wax, thermoplastic resin, thermosetting resin and the like may be used.

[0105] Examples of useful higher saturated fatty acid include stearic acid, zinc stearate, stearic acid amide and ethylenebis-stearic acid amide; those of wax include synthetic waxes such as polyethylene wax, carbon wax, Hoechst wax, and fatty acid ester; natural waxes such as carnauba wax, bees wax and Japan wax; and petroleum waxes such as paraffin wax and petrolatum. Examples of thermoplastic resin include polyolefins such as polyethylene, polypropylene, polybutene and polystyrene; vinyl polymers such as polyvinyl acetate, polyvinyl chloride, polyvinylidene chloride, polyacrylic acid, polymethacrylic acid, polyacrylate and polymethacrylate; diene polymers such as butadiene polymer, isoprene polymer, chloroprene polymer, butadiene-styrene copolymer, ethylene-propylene-diene copolymer, styrene-isoprene copolymer, MMA-butadiene copolymer and acrylonitrile-butadiene copolymer; polyolefin copolymers such as ethylene-propylene copolymer, butene-ethylene copolymer, butene-propylene copolymer, ethylene-vinyl acetate copolymer, ethylene-acrylic acid copolymer, styreneacrylic acid copolymer, ethylene-methacrylic acid copolymer, ethylene-methacrylic ester copolymer, ethylene-carbon monoxide copolymer, ethylene-vinyl acetate-carbon monoxide copolymer, ethylene-vinyl acetate-vinyl chloride copolymer and ethylene-vinyl acetate-acrylic copolymer; and vinyl chloride copolymers such as vinyl chloride-vinyl acetate copolymer and vinylidene chloride-vinyl chloride copolymer. Examples of thermosetting resin include polyurethane resin, epoxy resin, alkyd resin, unsaturated polyester resin, phenolic resin, urea-melamine resin, urea resin and silicone resin. Of those, thermoplastic acrylic ester resin, butadienestyrene copolymer resin, thermosetting polyurethane resin and epoxy resin are preferred, and among the preferred resins, particularly thermosetting polyurethane resin is preferred. These coating agents can be used either singly or in combination of two or more kinds.

[0106] In one embodiment, the compositions may include a seed, a part of a seed, a plant, or a plant part.

[0107] All plants, plant parts, seeds or soil may be treated in accordance with the compositions and methods disclosed herein. The compositions disclosed herein may include a plant, a plant part, a seed, a seed part, or soil. The compositions and methods disclosed herein may be applied to the seed, the plant or plant parts, the fruit, or the soil in which the plants grow.

[0108] Some embodiments relate to a method for reducing plant pathogen, pest, or insect damage to a plant or plant part comprising: (a) treating a seed with a composition disclosed herein prior to planting. In another embodiment, the method further comprises: (b) treating a plant part obtained from the seed with a composition disclosed herein. The composition used in step (a) may be the same or different than the composition used in step (b).

[0109] Some embodiments relate to a method for reducing plant pathogen, pest, or insect damage to a plant or plant part comprising: (a) treating the soil surrounding a seed or plant a bacterial strain disclosed herein, or a progeny, mutant, or variant thereof, a fermentate produced from a strain disclosed herein progeny, mutant, or variant thereof, and/or a depsipeptide. In another embodiment, the method further compri ses: (b) treating a plant part with a bacterial strain disclosed herein, or a progeny, mutant, or variant thereof, a fermentate produced from a strain disclosed herein progeny, mutant, or variant thereof, and/or a depsipeptide disclosed herein. The bacterial strain disclosed herein, or a progeny, mutant, or variant thereof, a fermentate produced from a strain disclosed herein progeny, mutant, or variant thereof, and/or a depsipeptide used in step (a) may be the same or different than a bacterial strain disclosed herein, or a progeny, mutant, or variant thereof, a fermentate produced from a strain disclosed herein progeny, mutant, or variant thereof, and/or a depsipeptide used in step (b).

[0110] Some embodiments relate to a method for reducing plant pathogen, pest, or insect damage to a plant or plant part comprising: (a) treating a seed prior to planting with a bacterial strain disclosed herein, or a progeny, mutant, or variant thereof, a fermentate produced from a strain disclosed herein progeny, mutant, or variant thereof, and/or a depsipeptide disclosed herein. In another embodiment, the method further comprises: (b) treating the soil surrounding the seed or plant with a bacterial strain disclosed herein, or a progeny, mutant, or variant thereof, a fermentate produced from a strain disclosed herein progeny, mutant, or variant thereof, and/or a depsipeptide disclosed herein. In still another embodiment, the method further comprises: (c) treating a plant part of a plant produced from the seed with a bacterial strain disclosed herein, or a progeny, mutant, or variant thereof, a fermentate produced from a strain disclosed herein progeny, mutant, or variant thereof, and/or a depsipeptide disclosed herein. The bacterial strain disclosed herein, or a progeny, mutant, or variant thereof, a fermentate produced from a strain disclosed herein progeny, mutant, or variant thereof, and/or a depsipeptide used in step (a) may be the same or different than the bacterial strain disclosed herein, or a progeny, mutant, or variant thereof, a fermentate produced from a strain disclosed herein progeny, mutant, or variant thereof, and/or a depsipeptide used in step (b). The bacterial strain disclosed herein, or a progeny, mutant, or variant thereof, a fermentate produced from a strain disclosed herein progeny, mutant, or variant thereof, and/or a depsipeptide used in step (a) may be the same or different than the bacterial strain disclosed herein, or a progeny, mutant, or variant thereof, a fermentate produced from a strain disclosed herein progeny, mutant, or variant thereof, and/or a depsipeptide used in step (c). The bacterial strain disclosed herein, or a progeny, mutant, or variant thereof, a fermentate produced from a strain disclosed herein progeny, mutant, or variant thereof, and/or a depsipeptide used in step (b) may be the same or different than the bacterial strain disclosed herein, or a progeny, mutant, or variant thereof, a fermentate produced from a strain disclosed herein progeny, mutant, or variant thereof, and/or a depsipeptide used in step (c).

[0111] In one embodiment, wild plant species and plant cultivars, or those obtained by conventional biological breeding, such as crossing or protoplast fusion, and parts thereof, can be treated with a bacterial strain disclosed herein, or a progeny, mutant, or variant thereof, a fermentate produced from a strain disclosed herein progeny, mutant, or variant thereof, and/or a depsipeptide disclosed herein. In another embodiment, transgenic plants and plant cultivars obtained by genetic engineering, and plant parts thereof, are treated with a bacterial strain disclosed herein, or a progeny, mutant, or variant thereof, a fermentate produced from a strain disclosed herein progeny, mutant, or variant thereof, and/or a depsipeptide disclosed herein.

[0112] In another embodiment, plants or plant cultivars (obtained by plant biotechnology methods such as genetic engineering or editing) that may be treated according to the strains, compositions and methods disclosed herein are herbicide-tolerant plants, i.e. plants made tolerant to one or more given herbicides. Such plants can be obtained either by genetic modification, or by selection of plants containing a mutation imparting such herbicide tolerance. Herbicide-resistant plants are for example glyphosate-tolerant plants, i.e. plants made tolerant to the herbicide glyphosate or salts thereof. Plants can be made tolerant to glyphosate through different means. For example, glyphosate-tolerant plants can be obtained by transforming the plant with a gene encoding the enzyme 5-enolpyruvylshilcimate-3-phosphate synthase (EPSPS).

[0113] Plants or plant cultivars (obtained by plant biotechnology methods such as genetic engineering or editing) that may also be treated are insect-resistant genetically modified plants, i.e. plants made resistant to attack by certain target insects. Such plants can be obtained by genetic transformation, or by selection of plants containing a mutation imparting such insect resistance.

[0114] In another embodiment, plants or plant cultivars (obtained by plant biotechnology methods such as genetic engineering) that may be treated according to the disclosure are tolerant to abiotic stresses. Such plants can be obtained by genetic transformation, or by selection of plants containing a mutation imparting such stress resistance.

[0115] In another embodiment, plants or plant cultivars (obtained by plant biotechnology methods such as genetic engineering or editing) that may be treated according to the disclosure are conventionally bred, by mutagenesis, or genetically engineered to contain a combination or stack of valuable traits, including but not limited to, herbicide tolerance, insect resistance, and abiotic stress tolerance.

[0116] The embodiments disclosed herein also apply to plant varieties which will be developed, or marketed, in the future and which have these genetic traits or traits to be developed in the future.

[0117] As used herein, applying a bacterial strain disclosed herein, or a progeny, mutant, or variant thereof, a fermentate produced from a strain disclosed herein progeny, mutant, or variant thereof, and/or a depsipeptide to a seed, a plant, or plant part includes contacting the seed, plant, or plant part directly and/or indirectly with the bacterial strain disclosed herein, or a progeny, mutant, or variant thereof, a fermentate produced from a strain disclosed herein progeny, mutant, or variant thereof, and/or a depsipeptide. In one embodiment, a bacterial strain disclosed herein, or a progeny, mutant, or variant thereof, a fermentate produced from a strain disclosed herein progeny, mutant, or variant thereof, and/or a depsipeptide may be directly applied as a spray, a rinse, or a powder, or any combination thereof.

[0118] As used herein, a spray refers to a mist of liquid particles that contain a bacterial strain disclosed herein, or a progeny, mutant, or variant thereof, a fermentate produced from a strain disclosed herein progeny, mutant, or variant thereof, and/or a depsipeptide of the present disclosure. In one embodiment, a spray may be applied to a plant or plant part while a plant or plant part is being grown. In another aspect, a spray may be applied to a plant or plant part while a plant or plant part is being fertilized. In another aspect, a spray may be applied to a plant or plant part while a plant or plant part is being harvested. In another aspect, a spray may be applied to a plant or plant part after a plant or plant part has been harvested. In another aspect, a spray may be applied to a plant or plant part while a plant or plant part is being processed. In another aspect, a spray may be applied to a plant or plant part while a plant or plant part is being packaged. In another aspect, a spray may be applied to a plant or plant part while a plant or plant part is being stored.

[0119] In another embodiment, a bacterial strain disclosed herein, or a progeny, mutant, or variant thereof, a fermentate produced from a strain disclosed herein progeny, mutant, or variant thereof, and/or a depsipeptide disclosed herein may be applied directly to a plant or plant part as a rinse. As used herein, a rinse is a liquid containing a bacterial strain disclosed herein, or a progeny, mutant, or variant thereof, a fermentate produced from a strain disclosed herein progeny, mutant, or variant thereof, and/or a depsipeptide disclosed herein. Such a rinse may be poured over a plant or plant part. A plant or plant part may also be immersed or submerged in the rinse, then removed and allowed to dry.

[0120] In another embodiment, a bacterial strain disclosed herein, or a progeny, mutant, or variant thereof, a fermentate produced from a strain disclosed herein progeny, mutant, or variant thereof, and/or a depsipeptide may be applied to a plant or plant part and may cover 50% of the surface area of a plant material. In another embodiment, a bacterial strain disclosed herein, or a progeny, mutant, or variant thereof, a fermentate produced from a strain disclosed herein progeny, mutant, or variant thereof, and/or a depsipeptide may be applied to a plant or plant part and may cover a percentage of the surface area of a plant material selected from the group consisting of: from 50% to about 95%, from 60% to about 95%, from 70% to about 95%, from 80% to about 95%, and from 90% to about 95%.

[0121] In another aspect, a bacterial strain disclosed herein, or a progeny, mutant, or variant thereof, a fermentate produced from a strain disclosed herein progeny, mutant, or variant thereof, and/or a depsipeptide may cover from about 20% to about 30%, from about 30% to about 40%, from about 40% to about 50%, from about 50% to about 60%, from about 60% to about 70%, from about 70% to about 80%, from about 80% to about 90%, from about 90% to about 95%, from about 95% to about 98%, from about 98% to about 99% or 100% of the surface area of a plant or plant part.

[0122] In another aspect, a bacterial strain disclosed herein, or a progeny, mutant, or variant thereof, a fermentate produced from a strain disclosed herein progeny, mutant, or variant thereof, and/or a depsipeptide disclosed herein may be applied directly to a plant or plant part as a powder. As used herein, a powder is a dry or nearly dry bulk solid composed of a large number of very fine particles that may flow freely when shaken or tilted. A dry or nearly dry powder composition disclosed herein preferably contains a low percentage of water, such as, for example, in various aspects, less than 5%, less than 2.5%, or less than 1% by weight.

[0123] In another aspect, a composition can be applied indirectly to the plant or plant part. For example, a plant or plant part having a bacterial strain disclosed herein, or a progeny, mutant, or variant thereof, a fermentate produced from a strain disclosed herein progeny, mutant, or variant thereof, and/or a depsipeptide already applied may be touching a second plant or plant part so that a bacterial strain disclosed herein, or a progeny, mutant, or variant thereof, a fermentate produced from a strain disclosed herein progeny, mutant, or variant thereof, and/or a depsipeptide rubs off on a second plant or plant part. In a further aspect, a bacterial strain disclosed herein, or a progeny, mutant, or variant thereof, a fermentate produced from a strain disclosed herein progeny, mutant, or variant thereof, and/or a depsipeptide may be applied using an applicator. In various aspects, an applicator may include, but is not limited to, a syringe, a sponge, a paper towel, or a cloth, or any combination thereof.

[0124] A contacting step may occur while a plant material is being grown, while a plant or plant part is being fertilized, while a plant or plant part is being harvested, after a plant or plant part has been harvested, while a plant or plant part is being processed, while a plant or plant part is being packaged, or while a plant or plant part is being stored in warehouse or on the shelf of a store.

[0125] In another embodiment, a bacterial strain disclosed herein, or a progeny, mutant, or variant thereof, a fermentate produced from a strain disclosed herein progeny, mutant, or variant thereof, and/or a depsipeptide disclosed herein may be a colloidal dispersion. A colloidal dispersion is a type of chemical mixture where one substance is dispersed evenly throughout another. Particles of the dispersed substance are only suspended in the mixture, unlike a solution, where they are completely dissolved within. This occurs because the particles in a colloidal dispersion are larger than in a solution—small enough to be dispersed evenly and maintain a homogenous appearance, but large enough to scatter light and not dissolve. Colloidal dispersions are an intermediate between homogeneous and heterogeneous mixtures and are sometimes classified as either “homogeneous” or “heterogeneous” based upon their appearance.

[0126] In one embodiment, the bacterial strain disclosed herein, or a progeny, mutant, or variant thereof, a fermentate produced from a strain disclosed herein progeny, mutant, or variant thereof, and/or a depsipeptide compositions and methods disclosed herein are suitable for use with a seed. In another embodiment, the the bacterial strain disclosed herein, or a progeny, mutant, or variant thereof, a fermentate produced from a strain disclosed herein progeny, mutant, or variant thereof, and/or a depsipeptide compositions and methods disclosed herein are suitable for use with a seed of one or more of any of the plants recited previously.

[0127] In still another embodiment, the bacterial strain disclosed herein, or a progeny, mutant, or variant thereof, a fermentate produced from a strain disclosed herein progeny, mutant, or variant thereof, and/or a depsipeptide compositions and methods disclosed herein can be used to treat transgenic or genetically modified or edited seed. A transgenic seed refers to the seed of plants containing at least one heterologous gene that allows the expression of a polypeptide or protein not naturally found in the plant. The heterologous gene in transgenic seed can originate, for example, from microorganisms of the species Bacillus, Rhizobium, Pseudomonas, Serratia, Trichoderma, Clavibacter, Glomus or Gliocladium.

[0128] In one embodiment, the seed is treated in a state in which it is sufficiently stable so that the treatment does not cause any damage. In general, treatment of the seed may take place at any point in time between harvesting and sowing. In one embodiment, the seed used is separated from the plant and freed from cobs, shells, stalks, coats, hairs or the flesh of the fruits. Thus, it is possible to use, for example, seed which has been harvested, cleaned and dried. Alternatively, it is also possible to use seed which, after drying, has been treated, for example, with water and then dried again.

[0129] In one embodiment, seed is treated with a bacterial strain disclosed herein, or a progeny, mutant, or variant thereof,a fermentate produced from a strain disclosed herein progeny, mutant, or variant thereof, and/or a depsipeptide compositions and methods disclosed herein in such a way that the germination of the seed is not adversely affected, or that the resulting plant is not damaged.

[0130] In one embodiment, a bacterial strain disclosed herein, or a progeny, mutant, or variant thereof, a fermentate produced from a strain disclosed herein progeny, mutant, or variant thereof, and/or a depsipeptide compositions disclosed herein may be applied directly to the seed. For example, the bacterial strain disclosed herein, or a progeny, mutant, or variant thereof, fermentate produced from a strain disclosed herein progeny, mutant, or variant thereof, and/or depsipeptide compositions disclosed herein may be applied without additional components and without having been diluted.

[0131] In another embodiment, a bacterial strain disclosed herein, or a progeny, mutant, or variant thereof, a fermentate produced from a strain disclosed herein progeny, mutant, or variant thereof, and/or a depsipeptide disclosed herein may be applied to the seed in the form of a suitable formulation. Suitable formulations and methods for the treatment of seed are known to the person skilled in the art and are described, for example, in the following documents: U.S. Pat. Nos. 4,272,417 A, 4,245,432 A, 4,808,430 A, 5,876,739 A, 2003/0176428 A1, WO 2002/080675 A1, WO 2002/028186 A2.

[0132] A bacterial strain disclosed herein, or a progeny, mutant, or variant thereof, a fermentate produced from a strain disclosed herein progeny, mutant, or variant thereof, and/or a depsipeptide disclosed herein can be converted into customary seed dressing formulations, such as solutions, emulsions, suspensions, powders, foams, slurries or other coating materials for seed, and also ULV formulations. These formulations are prepared in a known manner by mixing A bacterial strain disclosed herein, or a progeny, mutant, or variant thereof, a fermentate produced from a strain disclosed herein progeny, mutant, or variant thereof, and/or a depsipeptide disclosed herein with customary additives, such as, for example, customary extenders and also solvents or diluents, colorants, wetting agents, dispersants, emulsifiers, defoamers, preservatives, secondary thickeners, adhesives, gibberellins and water as well.

[0133] In another embodiment, suitable colorants that may be present in the seed dressing formulations include all colorants customary for such purposes. Use may be made both of pigments, of sparing solubility in water, and of dyes, which are soluble in water. Examples that may be mentioned include the colorants known under the designations Rhodamine B, C.I. Pigment Red 112, and C.I. Solvent Red 1.

[0134] In another embodiment, suitable wetting agents that may be present in the seed dressing formulations include all substances that promote wetting and are customary in the formulation of active agrochemical substances. With preference it is possible to use alkylnaphthalene-sulphonates, such as diisopropyl- or diisobutylnaphthalene-sulphonates.

[0135] In still another embodiment, suitable dispersants and/or emulsifiers that may be present in the seed dressing formulations include all nonionic, anionic, and cationic dispersants that are customary in the formulation of active agrochemical substances. In one embodiment, nonionic or anionic dispersants or mixtures of nonionic or anionic dispersants can be used. In one embodiment, nonionic dispersants include but are not limited to ethylene oxide-propylene oxide block polymers, alkylphenol polyglycol ethers, and tristyrylphenol polyglycol ethers, and their phosphated or sulphated derivatives.

[0136] In still another embodiment, defoamers that may be present in the seed dressing formulations to be used include all foam-inhibiting compounds that are customary in the formulation of agrochemically active compounds including but not limited to silicone defoamers, magnesium stearate, silicone emulsions, long-chain alcohols, fatty acids and their salts and also organofluorine compounds and mixtures thereof.

[0137] In still another embodiment, secondary thickeners that may be present in the seed dressing formulations include all compounds which can be used for such purposes in agrochemical compositions, including but not limited to cellulose derivatives, acrylic acid derivatives, polysaccharides, such as xanthan gum or Veegum, modified clays, phyllosilicates, such as attapulgite and bentonite, and also finely divided silicic acids.

[0138] Suitable adhesives that may be present in the seed dressing formulations may include all customary binders which can be used in seed dressings. Polyvinylpyrrolidone, polyvinyl acetate, polyvinyl alcohol and tylose may be mentioned as being preferred.

[0139] In yet another embodiment, seed dressing formulations may be used directly or after dilution with water beforehand to treat seed of any of a very wide variety of types. The seed dressing formulations or their dilute preparations may also be used to dress seed of transgenic plants. In this context, synergistic effects may also arise in interaction with the substances formed by expression.

[0140] Suitable mixing equipment for treating seed with the seed dressing formulations or the preparations prepared from them by adding water includes all mixing equipment that can commonly be used for dressing. The specific procedure adopted when dressing comprises introducing the seed into a mixer, adding the particular desired amount of seed dressing formulation, either as it is or following dilution with water beforehand, and carrying out mixing until the formulation is uniformly distributed on the seed. Optionally, a drying operation follows.

[0141] In various embodiments, a bacterial strain disclosed herein, or a progeny, mutant, or variant thereof, a fermentate produced from a strain disclosed herein progeny, mutant, or variant thereof, and/or a depsipeptide formulations can be added to the plant, plant part, and/or seed at a rate of about 1×10² to 1×10¹³ colony forming units (cfu) per seed, including about 1×10³ cfu/seed, or about 1×10⁴ cfu/seed, 1×10⁵ cfu/seed, or about 1×10⁶ cfu/seed, or about 1×10⁷ cfu/seed, or about 1×10⁸ cfu/seed, or about 1×10⁹ cfu/seed, or about 1×10¹⁰ cfu/seed, or about 1×10¹¹ cfu/seed, or about 1×10¹² cfu/seed, or about 1×10¹³ cfu/seed including about 1×10³ to 1×10⁸ cfu/seed about 1×10³ to 1×10⁷ cfu/seed, about 1×10³ to 1×10⁵ cfu/seed, about 1×10³ to 1×10⁶ cfu/seed, about 1×10³ to 1×10⁴ cfu/seed, about 1×10³ to 1×10⁹ cfu/seed, about 1×10³ to 1×10¹⁰ cfu/seed, about 1×10³ to 1×10¹¹ cfu/seed, about 1×10³ to 1×10¹² cfu/seed, about 1×10³ to 1×10¹³ cfu/seed, about 1×10⁴ to 1×10⁸ cfu/seed about 1×10⁴ to 1×10⁷ cfu/seed, about 1×10⁴ to 1×10⁵ cfu/seed, about 1×10⁴ to 1×10⁶ cfu/seed, about 1×10⁴ to 1×10⁹ cfu/seed, about 1×10⁴ to 1×10¹⁰ cfu/seed, about 1×10¹¹ to 1×10⁹ cfu/seed, about 1×10⁴ to 1×10¹² cfu/seed about 1×10⁴ to 1×10¹³ cfu/seed, about 1×10⁵ to 1×10⁷ cfu/per seed, about 1×10⁵ to 1×10⁶ cfu/per seed, about 1×10⁵ to 1×10⁸ cfu/per seed, about 1×10⁵ to 1×10⁹ cfu/per seed, about 1×10⁵ to 1×10¹⁰ cfu/per seed, about 1×10⁵ to 1×10¹¹ cfu/per seed, about 1×10⁵ to 1×10¹² cfu/per seed, about 1×10⁵ to 1×10¹³ cfu/per seed, about 1×10⁶ to 1×10⁸ cfu/per seed, about 1×10⁶ to 1×10⁷ cfu/per seed, about 1×10⁶ to 1×10⁹ cfu/per seed, about 1×10⁶ to 1×10¹⁰ cfu/per seed, about 1×10⁶ to 1×10¹¹ cfu/per seed, about 1×10⁶ to 1×10¹² cfu/per seed, about 1×10⁶ to 1×10¹³ cfu/per seed, about 1×10⁷ to 1×10⁸ cfu/per seed, about 1×10⁷ to 1×10⁹ cfu/per seed, about 1×10⁷ to 1×10¹⁰ cfu/per seed, about 1×10⁷ to 1×10¹¹ cfu/per seed, about 1×10⁷ to 1×10¹² cfu/per seed, about 1×10⁷ to 1×10¹³ cfu/per seed, about 1×10⁸ to 1×10⁹ cfu/per seed, about 1×10⁸ to 1×10¹⁰ cfu/per seed, about 1×10⁸ to 1×10¹¹ cfu/per seed, about 1×10⁸ to 1×10¹² cfu/per seed, about 1×10⁸ to 1×10¹³ cfu/per seed, about 1×10⁹ to 1×10¹⁰ cfu/per seed, about 1×10⁹ to 1×10¹¹ cfu/per seed, about 1×10⁹ to 1×10¹² cfu/per seed, about 1×10⁹ to 1×10¹³ cfu/per seed, about 1×10¹⁰ to 1×10¹¹ cfu/per seed, about 1×10¹⁰ to 1×10¹² cfu/per seed, about 1×10¹⁰ to 1×10¹³ cfu/per seed, about 1×10¹¹¹ to 1×10¹² cfu/per seed, about 1×10¹¹ to 1×10¹³ cfu/per seed, and about 1×10¹² to 1×10¹³ cfu/per seed. As used herein, the term “colony forming unit” or “cfu” is a unit capable of growing and producing a colony of a microbial strain in favorable conditions.

[0142] In one embodiment, a bacterial strain disclosed herein, or a progeny, mutant, or variant thereof, a fermentate produced from a strain disclosed herein progeny, mutant, or variant thereof, and/or a depsipeptide may be formulated as a liquid seed treatment. A seed treatment may comprise at least one a bacterial strain disclosed herein, or a progeny, mutant, or variant thereof, a fermentate produced from a strain disclosed herein progeny, mutant, or variant thereof, and/or a depsipeptide composition. The seeds are substantially uniformly coated with one or more layers of a bacterial strain disclosed herein, or a progeny, mutant, or variant thereof, a fermentate produced from a strain disclosed herein progeny, mutant, or variant thereof, and/or a depsipeptide, using conventional methods of mixing, spraying or a combination thereof. Application is done using equipment that accurately, safely, and efficiently applies seed treatment products to seeds. Such equipment uses various types of coating technology such as rotary coaters, drum coaters, fluidized bed techniques, spouted beds, rotary mists or a combination thereof.

[0143] In one embodiment, the application is done via either a spinning “atomizer” disk or a spray nozzle that evenly distributes the seed treatment onto the seed as it moves through the spray pattern. In yet another embodiment, the seed is then mixed or tumbled for an additional period of time to achieve additional treatment distribution and drying. The seeds may be primed or unprimed before coating with a composition disclosed herein to increase the uniformity of germination and emergence. In an alternative embodiment, a dry powder composition can be metered onto the moving seed.

[0144] In still another embodiment, the seeds may be coated via a continuous or batch coating process. In a continuous coating process, continuous flow equipment simultaneously meters both the seed flow and the seed treatment products. A slide gate, cone and orifice, seed wheel, or weight device (belt or diverter) regulates seed flow. Once the seed flow rate through treating equipment is determined, the flow rate of the seed treatment is calibrated to the seed flow rate in order to deliver the desired dose to the seed as it flows through the seed treating equipment. Additionally, a computer system may monitor the seed input to the coating machine, thereby maintaining a constant flow of the appropriate amount of seed.

[0145] In a batch coating process, batch treating equipment weighs out a prescribed amount of seed and places the seed into a closed treating chamber or bowl where the corresponding of seed treatment is then applied. The seed and seed treatment are then mixed to achieve a substantially uniform coating on each seed. This batch is then dumped out of the treating chamber in preparation for the treatment of the next batch. With computer control systems, this batch process is automated enabling it to continuously repeat the batch treating process.

[0146] A variety of additives can be added to the seed treatments. Binders can be added and include those composed preferably of an adhesive polymer that can be natural or synthetic without phytotoxic effect on the seed to be coated. A variety of colorants may be employed, including organic chromophores classified as nitroso, nitro, azo, including monoazo, bisazo, and polyazo, diphenylmethane, triarylmethane, xanthene, methane, acridine, thiazole, thiazine, indamine, indophenol, azine, oxazine, anthraquinone, and phthalocyanine. Other additives that can be added include trace nutrients such as salts of iron, manganese, boron, copper, cobalt, molybdenum, and zinc. A polymer or other dust control agent can be applied to retain the treatment on the seed surface.

[0147] Other conventional seed treatment additives include, but are not limited to, coating agents, wetting agents, buffering agents, and polysaccharides. At least one agriculturally acceptable carrier can be added to the seed treatment formulation such as water, solids or dry powders. The dry powders can be derived from a variety of materials such as wood barks, calcium carbonate, gypsum, vermiculite, talc, humus, activated charcoal, and various phosphorous compounds.

[0148] In one embodiment, the seed coating can comprise of at least one filler, which is an organic or inorganic, natural or synthetic component with which a bacterial strain disclosed herein, or a progeny, mutant, or variant thereof, a fermentate produced from a strain disclosed herein progeny, mutant, or variant thereof, and/or a depsipeptide described herein is combined to facilitate its application onto the seed. In one embodiment, the filler is an inert solid such as clays, natural or synthetic silicates, silica, resins, waxes, solid fertilizers (for example ammonium salts), natural soil minerals, such as kaolins, clays, talc, lime, quartz, attapulgite, montmorillonite, bentonite, or diatomaceous earths, or synthetic minerals, such as silica, alumina, or silicates, in particular aluminum or magnesium silicates.

[0149] In one embodiment, a bacterial strain disclosed herein, or a progeny, mutant, or variant thereof, a fermentate produced from a strain disclosed herein progeny, mutant, or variant thereof, and/or a depsipeptide disclosed herein may be formulated by encapsulation technology to improve fungal spore stability and as a way to protect the fungal spores from seed applied fungicides. In one embodiment the encapsulation technology may comprise a bead polymer for timed release of fungal spores over time. In one embodiment, the encapsulation technology may comprise a zeolite material. In one embodiment, an encapsulated bacterial strain disclosed herein, or a progeny, mutant, or variant thereof, fermentate produced from a strain disclosed herein progeny, mutant, or variant thereof, and/or depsipeptide may be applied in a separate application of beads in-furrow to the seeds. In another embodiment, the encapsulated bacterial strain disclosed herein, or a progeny, mutant, or variant thereof, fermentate produced from a strain disclosed herein progeny, mutant, or variant thereof, and/or depsipeptide may be co-applied along with seeds simultaneously.

[0150] Insect resistance management (IRM) is the term used to describe practices aimed at reducing the potential for insect pests to become resistant to an insect management tactic. IRM maintenance of Bt (Bacillus thuringiensis) derived pesticidal proteins, other pesticidal proteins, a chemical, a biological agent, or other biologicals, is of great importance because of the threat insect resistance poses to the future use of pesticidal plant-incorporated protectants and insecticidal trait technology as a whole. Specific IRM strategies, such as the refuge strategy, mitigate insect resistance to specific insecticidal proteins produced in corn, soybean, cotton, and other crops. However, such strategies result in portions of crops being left susceptible to one or more pests in order to ensure that non-resistant insects develop and become available to mate with any resistant pests produced in protected crops. Accordingly, from a farmer/producer's perspective, it is highly desirable to have as small a refuge as possible and yet still manage insect resistance, in order that the greatest yield be obtained while still maintaining the efficacy of the pest control method used, whether Bt, a different pesticidal protein, chemical, biological agent or other biologicals, some other method, or combinations thereof.

[0151] Another strategy to reduce the need for refuge is the pyramiding of traits with different modes of action against a target insect pest. For example, Bt toxins that have different modes of action pyramided in one transgenic plant are able to have reduced refuge requirements due to reduced resistance risk. Different modes of action in a pyramid combination also extend the durability of each trait, as resistance is slower to develop to each trait.

[0152] Currently, the size, placement, and management of the refuge are often considered critical to the success of refuge strategies to mitigate insect resistance to the Bt/pesticidal trait produced in corn, cotton, soybean, and other crops. Because of the decrease in yield in refuge planting areas, some farmers choose to eschew the refuge requirements, and others do not follow the size and/or placement requirements. These issues result in either no refuge or a less effective refuge, and a corresponding risk of the increase in the development of resistance pests.

[0153] Accordingly, there remains a need for methods for managing pest resistance in a plot of pest resistant crop plants. It would be useful to provide an improved method for the protection of plants, especially corn or other crop plants, from feeding damage by pests. It would be particularly useful if such a method would reduce the required application rate of conventional chemical pesticides, and also if it would limit the number of separate field operations that were required for crop planting and cultivation. In addition, it would be useful to have a method of deploying a biocontrol agent that increases the durability of an insecticidal trait or increases the efficacy of many resistance management strategies.

[0154] One embodiment relates to a method of reducing or preventing the resistance of pests to a plant pesticidal composition comprising providing a plant protection composition, such as a Bt pesticidal protein, a transgenic pesticidal protein, other pesticidal proteins, chemical pesticides, or pesticidal biological entomopathogens, to a plant and/or plant part or a planted area or insecticidal trait and providing a bacterial strain disclosed herein, or a progeny, mutant, or variant thereof, a fermentate produced from a strain disclosed herein progeny, mutant, or variant thereof, and/or a depsipeptide described herein to the plant and/or plant part or planted area. Another embodiment relates to a method of reducing or preventing the resistance to a plant insecticidal trait comprising providing or contacting a plant with a bacterial strain disclosed herein, or a progeny, mutant, or variant thereof, a fermentate produced from a strain disclosed herein progeny, mutant, or variant thereof, and/or a depsipeptide described herein.

[0155] A further embodiment relates to a method of increasing the durability of plant pest compositions comprising providing a plant protection composition to a plant or planted area, and providing a bacterial strain disclosed herein, or a progeny, mutant, or variant thereof, a fermentate produced from a strain disclosed herein progeny, mutant, or variant thereof, and/or a depsipeptide described herein to the plant or planted area, wherein the bacterial strain disclosed herein, or a progeny, mutant, or variant thereof, fermentate produced from a strain disclosed herein progeny, mutant, or variant thereof, and/or depsipeptide described herein have a different mode of action than the plant protection composition.

[0156] In a still further embodiment, the refuge required may be reduced or eliminated by the presence of a bacterial strain disclosed herein, or a progeny, mutant, or variant thereof, a fermentate produced from a strain disclosed herein progeny, mutant, or variant thereof, and/or a depsipeptide described herein applied to the non-refuge plants. In another embodiment, the refuge may include a bacterial strain disclosed herein, or a progeny, mutant, or variant thereof, a fermentate produced from a strain disclosed herein progeny, mutant, or variant thereof, and/or a depsipeptide described herein as a spray, bait, or as a different mode of action.

[0157] In one embodiment, a composition comprises a bacterial strain disclosed herein, or a progeny, mutant, or variant thereof, a fermentate produced from a strain disclosed herein progeny, mutant, or variant thereof, and/or a depsipeptide disclosed herein and a non-Bt insecticidal trait increases resistance to a pathogen, pest, or insect. In another embodiment, the non-Bt insecticidal trait comprises a plant-derived insecticidal protein, a bacterial/archeal-derived insecticidal protein not from a Bt (such as a Pseudomonas insecticidal protein), an animal-derived insecticidal protein, or a silencing element. In another embodiment, a composition comprising a bacterial strain disclosed herein, or a progeny, mutant, or variant thereof, a fermentate produced from a strain disclosed herein progeny, mutant, or variant thereof, and/or a depsipeptide disclosed herein and a non-Bt insecticidal trait increases durability of the non-Bt insecticidal trait. In another embodiment, the non-Bt insecticidal trait comprises a PIP-72 polypeptide of PCT Serial Number PCT/US14/55128. In another embodiment, the non-Bt insecticidal trait comprises a polynucleotide silencing elements targeting RyanR (DvSSJ) (US Patent Application publication 2014/0275208). In another embodiment, the non-Bt insecticidal trait comprises a polynucleotide silencing elements targeting RyanR (DvSSJ) (US Patent Application publication 2014/0275208, herein incorporated by reference in its entirety) and a PIP-72 polypeptide of PCT Serial Number PCT/US14/55128, herein incorporated by reference in its entirety.

[0158] In another embodiment, a composition comprising a bacterial strain disclosed herein, or a progeny, mutant, or variant thereof, a fermentate produced from a strain disclosed herein progeny, mutant, or variant thereof, and/or a depsipeptide disclosed herein and a fungal entomopathogen disclosed in U.S. Pat. No. 9,993,006, herein incorporated by reference in its entirety.

[0159] In some embodiments, a composition comprises a bacterial strain disclosed herein, or a progeny, mutant, or variant thereof, a fermentate produced from a strain disclosed herein progeny, mutant, or variant thereof, and/or a depsipeptide disclosed herein and a Bt insecticidal trait that increases resistance to a pathogen, pest, or insect. A Bt insecticidal trait may have activity to Coleopteran, Lepidopteran, or Hemipteran plant pests. The compositions disclosed herein may provide to a plant or plant part additive or synergistic resistance to a pathogen, pest, or insect plant in combination with a Bt insecticidal trait. In one embodiment, a composition comprises a bacterial strain disclosed herein, or a progeny, mutant, or variant thereof, a fermentate produced from a strain disclosed herein progeny, mutant, or variant thereof, and/or a depsipeptide disclosed herein and a Bt insecticidal trait, wherein the Bt insecticidal trait comprises a Cry3B toxin disclosed in U.S. Pat. Nos. 8,101,826, 6,551,962, 6,586,365, 6,593,273, and PCT Publication WO 2000/011185, a mCry3B toxin disclosed in U.S. Pat. Nos. 8,269,069, and 8,513,492, a mCry3A toxin disclosed in U.S. Pat. Nos. 8,269,069, 7,276,583 and 8,759,620, or a Cry34/35 toxin disclosed in U.S. Pat. Nos. 7,309,785, 7,524,810, 7,985,893, 7,939,651 and 6,548,291, and transgenic events containing these Bt insecticidal toxins and other Coleopteran active Bt insecticidal traits for example, event MON863 disclosed in U.S. Pat. No. 7,705,216, event MIR604 disclosed in U.S. Pat. No. 8,884,102, event 5307 disclosed in U.S. Pat. No. 9,133,474, event DAS-59122 disclosed in U.S. Pat. No. 7,875,429, event DP-4114 disclosed in U.S. Pat. No. 8,575,434, event MON 87411 disclosed in US Published Patent Application Number 2013/0340111, and event MON88017 disclosed in U.S. Pat. No. 8,686,230 all of which are incorporated herein by reference. All publications, patents and patent applications mentioned in the specification indicate the level of those skilled in the art to which this disclosure pertains. All publications, patents and patent applications are incorporated by reference to the same extent as if each individual publication, patent or patent application was specifically and individually indicated to be incorporated by reference.

[0160] A bacterial strain disclosed herein, or a progeny, mutant, or variant thereof, a fermentate produced from a strain disclosed herein progeny, mutant, or variant thereof, and/or a depsipeptide compositions and methods will be further understood by reference to the following non-limiting examples. The following Examples are provided for illustrative purposes only. The Examples are included solely to aid in a more complete understanding of the described embodiments. The Examples do not limit the scope of the embodiments described or claimed.

### EXAMPLE 1

### Identification of Pseudomonas chlororaphis Strain SS532D1 (NRRL Deposit No. B-67638) with Toxicity against Fall Armyworm

[0161] Insecticidal activity against Fall Armyworm (FAW, Spodoptera frugiperda) was observed in the fermented broth from soil sample-derived microbial strain SS532D1. It was grown in Tryptic Soy Broth (Soybean-Casein Digest Medium: Tryptone—17 g/L, Soytone—3 g/L, Glucose—2.5 g/L, Sodium Chloride—5 g/L and Dipotassium hydrogen phosphate—2.5 g/L) at 26° C. for 2 days with shaking at 210 rpm. Genomic DNA from strain SS532D1 was extracted with a Sigma Bacterial Genomic DNA Extraction Kit (Cat #NA2110-KT, Sigma-Aldrich, PO Box 14508, St. Louis, Mo. 63178) according to the manufactures' instructions. The DNA concentration was determined using a NanoDrop Spectrophotometer (Thermo Scientific) and the genomic DNA was diluted to 40 ng/ul with sterile water. A 25 ul PCR reaction was set up by combining 80 ng genomic DNA, 2 ul (5 uM) 16S ribosomal DNA primers TACCTTGTTACGACTT (SEQ ID NO: 209) and AGAGTTTGATCMTGGCTCAG (SEQ ID NO: 210), 1 ul 10 cmM dNTP, 1× Phusion HF buffer, and 1 unit of Phusion High-Fidelity DNA Polymerase (New England Biolabs). The PCR reaction was run in MJ Research PTC-200 Thermo Cycler (Bio-Rad Laboratories, Inc., California) with the following program: 96° C. 1 min; 30 cycles of 96° C. 15 seconds, 52° C. 2 minutes and 72° C. 2 minutes; 72° C. 10 minutes; and hold on 4° C. The PCR products were purified with QiaQuick DNA purification Kit (QIAGEN Inc., California). The purified PCR sample was sequenced and the resulting 16S ribosomal DNA sequence (SEQ ID NO:1) was BLAST searched against the NCBI database which indicated that SS532D1 is a Pseudomonas chlororaphis strain.

### EXAMPLE 2

### Leaf Painting Assay on FAW with SSP532D1 Culture

[0162] Strain SSP532D1 was grown in Tryptic soy broth (TSB, tryptone—17 g/L, soytone—3 g/L, glucose—2.5 g/L, sodium chloride—5 g/L and dipotassium hydrogen phosphate—2.5 g/L) at 26 C for 2 days. The culture was diluted as 1×, 1/2 and 1/4× with Milli-Q water. Twenty-five microliters of undiluted or diluted cultures was painted on each bush bean leaf disk. After being air-dried, leaf disks were placed on the top of agar (1%) in 48-well plates. Three FAW neonate larvae were placed on top of the leaf disk in each well. Results were scored after 3 days. Insects were killed on leaf disks treated with undiluted and diluted SSP532D1 culture and the leaf disks showed no obvious feeding damage. Insects on leaf disks treated with non-active cultures consumed a significant amount of the leaf disks.

### EXAMPLE 3

### Lepidoptera Diet-Based Feeding Assays

[0163] Lepidopteran feeding assays (including FAW) were conducted on an artificial diet containing fermented broth in a 96 well plate set up. The broth was incorporated with multi-species Lepidopteran artificial diet (Southland Products Inc., Arkansas) in a ratio of 25 μl test sample and 35 μl of diet. Two to five neonate larvae were placed in each well to feed for 4 days. Results were expressed as positive for larvae reactions such as stunting and/or mortality. Results were expressed as negative if the larvae were similar to the negative control that is fed diet to which the above control broth only has been applied.

### Coleoptera Diet Based Feeding Assays

[0164] Western Corn Rootworm (WCRW, Diabrotica virgifera virgifera) bioassays were conducted in a 96 well plate format, mixing 10 μl of test sample with 50 μl molten modified Southern Corn Rootworm diet (Frontier Agricultural Sciences, diet F9800B). WCRW neonates were placed into each well before heat sealed with a Mylar film. Holes are punched in the film to allow air exchange. The assay was run four days at 25° C. in the dark. The plates were then scored for insect mortality and stunting of insect growth. The scores were noted as dead, severely stunted (little or no growth but alive), stunted (growth but not equivalent to controls) or no activity.

### Hemiptera Diet Based Feeding Assays

[0165] Southern green stinkbug (Nezara viridula) bioassays were conducted using 40 ul of fermented medium was mixed with 360 ul of Lygus diet (Bio-Sery F9644B) in Parafilm® packets. 10 to 15 newly molted second instar nymphs were placed in polystyrene Petri dishes (100 mm×20 mm) lined with moist Whatman® filter paper (100 mm diameter). Included in the dish was a water source. The bioassay was incubated at 25° C. in the dark for three days and the then the diet/sample packet was replaced. The bioassay was scored for mortality and stunting after a total of 6 days.

### EXAMPLE 4

### Characterization of Insecticidal Activity in Fermented Broth from Strain SS532D1

[0166] Fermented broth from strain SS532D1 grown for 2 days in Tryptic soy broth was tested for activity against several other insect species. Broad spectrum activity was observed. Undiluted fermented broth mixed with artificial diet, as described in Example 3, caused mortality in the following species: European corn borer (ECB, Ostrinia nubilalis), fall armyworm (FAW, Spodoptera frugiperda), soybean looper (SBL, Pseudoplusia includens), velvet bean caterpillar (VBC, Anticarsia gemmatalis), diamondback moth (DBM, Plutella xylostella), Western corn rootworm (WCRW, Diabrotica virgifera) and black bean aphid (Aphis fabae). Severe stunting was observed against Southern corn rootworm (Diabrotica undecimpunctata howardi) and corn earworm (Hehcoverpa zea). No activity was found against Southern green stinkbug (Nezara viridula) as tested.

[0167] To maximize insecticidal activity in the fermented broth several growth media were tested against FAW and WCRW, specifically Tryptic soy broth (TSB, tryptone—17 g/L, soytone—3 g/L, glucose—2.5 g/L, sodium chloride—5 g/L and dipotassium hydrogen phosphate—2.5 g/L), 2×YT medium (Bacto Tryptone—16 g/L, Bacto Yeast Extract—10 g/L, sodium chloride—5 g/L), Luria Broth (LB, Tryptone Peptone—10 g/L, Yeast Extract 5-g/L, sodium chloride—10 g/L), King's medium (Peptone—20 g/L, Glycerol—15 ml/L, K₂HPO₄—1.5 g/L, MgSO₄*7H₂0—1.5 g/L) ISP-2 medium (Yeast Extract—4.0 g/L, Malt Extract—10.0 g/L, Dextrose—4.0 g/L) and M9 minimal medium (Na₂HPO₄×7H₂O—12.8 g/L, KH₂PO₄—3 g/L, NaCl—0.5 g/L, NH₄Cl—1 g/L, CaCl₂—1.1 mg/L, MgSO₄—240.7 mg/L, glucose—4 g/L). Strain SS532D1 was grown at 26° C. at 210 rpm. After 2 days, growth medium was harvested by centrifugation and bioassays were performed on FAW and WCRW. All spent media showed insecticidal activity on both insects, with King's medium showing the highest potency. The results are summarized in FIG. 2. Insecticidal activity against FAW was highest at 1 to 2 days of growth in King's medium and declined after 3 and 6 days of fermentation.

### EXAMPLE 5

### Lepidoptera Small-Scale, Plant-Based Assays

[0168] Two types of broth produced after fermentation of strain SS532D1, herein referred to as Broth A and Broth B. Broth A was produced in King's Media (King's) and Broth B was produced in M9 Minimal Media (M9). Both media contained the same depsipeptide after fermentation. The only difference from Broth A to King's Media and Broth B was produced in M9 Minimal Media being that the Broth A and B were used to grow the bacterium, Pseudomonas chlororaphis strain SS532D1.

[0169] Broths A (King's Media) and B (M9 Minimal Media) were tested against DBM and FAW in small-scale foliar assays. Test units were comprised of 20 cm³ pots with 20 g of Woodstown Sandy Loam soil (Delmar, Del.) and mustard (Brassicae kaber, 3.5-4 cm in height) or corn (Zea mays, 6 cm) as host plants for DBM and FAW, respectively. Test compounds were sprayed on plants in a 120 μL volume and allowed to dry for 4 hours prior to infestation. Test units were infested with approximately 15-20 DBM and FAW neonates and kept in controlled conditions of 25° C./70% RH/16:8 h (L:D) photoperiod. After six days, assays were scored using a binary scoring system in which plant damage=0 and no plant damage=1. The results are reported as percent activity, which are the averages of the three technical replicates per treatment in the assay. Treatments included undiluted Broths A and B, unspent King's and M9 Minimal media (fresh media without bacterial growth), and untreated controls. Broth A controlled both DBM and FAW (Table 2). Broth B was effective against DBM, but only partially against FAW (33.3%). No activity was observed in untreated or unspent media controls.

TABLE 2
Activity of Broth A and Broth B on diamondback moth
and fall armyworm in small-scale foliar assays.

| Treatment | DBM | FAW |
|---|---|---|
| Untreated Control | 0 | 0 |
| King's | 0 | 0 |
| M9 | 0 | 0 |
| Broth A | 100 | 100 |
| Broth B | 100 | 33.3 |

### EXAMPLE 6

### Lepidoptera Medium-Sized, Plant-Based Assays

[0170] Broths A and B were tested against four insect species in medium insect test units; DBM, FAW, beet armyworm (Spodoptera exigua; BAW), and corn earworm (Helicoverpa zea; CEW). Test units were comprised of 70 cm³ bases with 35 g of Woodstown Sandy Loam soil (Delmar, Del.) and mustard (Brassicae kaber; 6.5-7 cm), corn (Zea mays; 7-8 cm) or Bush bean (Phaseolus vulgaris; 6-7cm) as host plants for DBM, FAW and BAW, and CEW, respectively. Three concentrations of Broths A and B were tested: 0.25, 0.5 and 1×, with and without the surfactant X-77. Spinetoram was included as a positive control. Untreated controls were also included. Test units were sprayed with 1.2 mL of broth, in triplicate, and subsequently infested with approximately 15-20 stage 1 BAW or FAW larvae, or 30-40 neonate DBM or CEW. Units were kept in controlled conditions of 25° C./70% RH/16:8 h (L:D) photoperiod for six days and then scored. There are two scores given for each treatment, (1) plant damage rating from 0-10, with 0 being no damage and 10 being plant was completely consumed, and (2) insect live or dead (live=F; dead=K). The scores are averages of the three technical replicates. Any treatment with a plant damage score of 3 or less and an insect rating of K was considered to be active.

[0171] Tables 3 and 4 summarize the data obtained for Broths A and B without and with the surfactant X-77, respectively. For the assay without the surfactant, Broth A was active against all four species at all three concentrations except for 0.5× for CEW (Table 3). Broth B was active against BAW at all three concentrations. Broth B was also active against FAW at 0.5 and 1×. However, Broth B showed no activity against CEW as tested. Unspent King's and M9 media were both active against DBM (data not shown). Otherwise, all other controls performed within expected parameters. Overall, the results obtained for Broth A formulated with the surfactant X-77 were similar to those obtained for the broth without the surfactant. However, the efficacy of Broth B was reduced when formulated with X-77, in particular, against FAW (Table 4).

TABLE 3
Activity of Broth A and Broth B against beet
armyworm, fall armyworm and corn earworm.

| | dilution | | | |
|---|---|---|---|---|
| | or ppm | BAW | FAW | CEW |
| Untreated Control | None | 10 F | 10 F | 10 F |
| King's | 0 | 10 F | 10 F | 9 F |
| M9 | 0 | 10 F | 10 F | 8 F |
| Broth A | 1X | 1 K | 1 K | 2 K |
| | 0.5X | 1 K | 2 K | 4 F |
| | 0.25X | 1 K | 3 K | 3 K |
| Broth B | 1X | 1 K | 3 K | 4 K |
| | 0.5X | 1 K | 3 K | 8 F |
| | 0.25X | 1 K | 9 F | 10 F |
| Spinetoram | 2 | 0 K | 0 K | 0 K |
| | 0.2 | 4 F | 1 K | 1 K |
| | 0.1 | 7 F | 5 F | 1 K |
| | 0.03 | | | |
| | 0.01 | | | |
| | 0.003 | | | |

TABLE 4
Activity of Broth A and Broth B formulated with the surfactant
X-77 against beet armyworm, fall armyworm and corn earworm.

| | dilution | | | |
|---|---|---|---|---|
| | or ppm | BAW | FAW | CEW |
| Untreated Control | None | 10 F | 10 F | 10 F |
| King's | 0 | 10 F | 10 F | 4 K |
| M9 | 0 | 10 F | 10 F | 7 F |
| Broth A | 1X | 1 K | 2 K | 2 K |
| | 0.5X | 1 K | 3 K | 2 F |
| | 0.25X | 1 K | 3 K | 3 F |
| Broth B | 1X | 1 K | 4 F | 7 F |
| | 0.5X | 1 K | 7 F | 8 F |
| | 0.25X | 1 K | 10 F | 9 F |
| Spinetoram | 2 | 4 F | 0 K | 0 K |
| | 0.2 | 4 F | 1 K | 1 K |
| | 0.1 | 7 F | 5 F | 1 K |
| | 0.03 | | | |
| | 0.01 | | | |
| | 0.003 | | | |

### EXAMPLE 7

### Isolation and Identification of the Active Insecticidal Component

[0172] Growth medium from M9 minimal media inoculated with strain SS532D1 was harvested by centrifugation. 100% Acetonitrile was added to the harvested medium to a final concentration of 20% and minor precipitation was removed by centrifugation.

[0173] The active insecticidal component was isolated using a Chemstation® 1200 series HPLC system (Agilent®) with a C-18 reverse phase column (Phenomenex). The HPLC was prepared with trifluoroacetic acid diluted to 0.1% in Milli Q® water (Mobile Phase A) and 100% Acetonitrile with 0.1% trifluoroacetic acid included (Mobile Phase B). The C-18 reverse phase column was equilibrated with 20% Mobile Phase B. Adjusted growth medium was injected onto the column and the following method was performed: 2 column volume (CV) hold at 20% Mobile Phase B, 12 CV linear gradient from 20% Mobile Phase B to 80% Mobile Phase B, 100% Mobile Phase B hold for 2 CV, 20% Mobile Phase B hold for 5 CV. UV absorbance was monitored at 220 nm and elution fractions were collected during the linear gradient. Elution fractions were lyophilized and reconstituted in water for testing on Lepidoptera feeding assay in artificial diet as described in Example 3 to identify the fractions containing the pure toxin.

### EXAMPLE 8

### Structural Determination by Mass Spectrometry

[0174] The mass spectrometry data was obtained on a Thermo Q Exactive Orbitrap® mass spectrometer (Thermo Fisher Scientific®) interfaced with an Eksigent NanoLC Ultra 1-D Plus® nano-lc system and a nanolc-as2 auto sampler (AB Sciex).

[0175] The mass resolution was set at 70k for MS¹ scans and 17500 for MS² scans. For MS² scans the normalized collision energy (NCE) was set at 15 eV, 27 eV or 35 eV. The MS³ spectra were obtained by fragmenting the peptides with in-source fragmentation at 75 eV followed by MS² scans of the in-source fragment ions at 27 eV. All MS² scans were obtained in data dependent acquisition (DDA) mode. External mass calibration was carried out before the sample analysis.

[0176] The peptides were either separated on a nano-lc column self-packed with a New Objective PicoTip® nanosrapy emitter (15 cm length, 75 mm ID and 15 micron tip, New) Objective®) and 5 micron particle size reversed-phased C18 (Magic C18, Michrom Bioresources®) or directly eluted into the mass spectrometer from a C18-based trap column. The nano-LC mobile phase A was 0.1% formic acid in water and the mobile phase B was 0.1% formic acid in acetonitrile. The gradient program was 5% B for 1 min. followed by an increase of B to 90% in 29 min. and then 10 min. in 90% B with a flow rate at 300 nL/min.

[0177] LC/MS/MS methods and results (elemental composition) identification of depsipeptide structure FR901375 by database search confirmation of depsipeptide by LC-MS/MS/MS fragment ion analysis (Bogdan). Structure was confirmed by 2D NMR.

### EXAMPLE 9

### Potency of Depsipeptide Structure FR901375 against FAW

[0178] Strain SS531D2 was grown in Kings Medium for 2 days. The fermentate was harvested by centrifugation and filter sterilized. The presence and concentration of the depsipeptide was determined by LC-MS/MS using multiple reaction monitoring (MRM) as described. The concentration in the fermentate was 55 ug/ml. Serial dilutions were prepared and bioactivity against WCRW and several lepidopteran species was assessed in artificial diet feeding assays as described in Example 3. The potency of the depsipeptide is summarized in Table 5.

TABLE 5
The potency of depsipeptide on insects

| Insect | minimal dose to achieve 100% mortality | |
|---|---|---|
| Western Corn Rootworm | 23 | ppm |
| Fall Armyworm | 2 | pmm |
| Corn Earworm | 11 | ppm |
| European Corn Borer | 2 | ppm |
| Soybean Looper | 1 | ppm |

### EXAMPLE 10

### Identification of other Depsipeptide Producing Strains

[0179] In the screening of more bacterial collections, multiple strains showed broad spectrum insecticidal activity. The species of those active strains were identified by 16S sequences as described in Example 1. They include Pseudomonas chlororaphis strain SSP459B9-3, Burkholderia rinojensis strain JH58178-1, and Chromobacterium haemolyticum strains JH97285-1, JH91791-1, PMC3591F10-1, PMCJ4191H4-1, and PMCJ4232B7-1 (Table 6). All these strains produce depsipeptides which contribute to their insecticidal activities. Further analysis, as set forth in Example 8, found a second depsipeptide structure, FK228, was produced in some strains

TABLE 6
Depsipeptide producing strains and their species, active
spectrum, NRRL # and 16S rDNA sequences

| | | Insecticidal | NRRL Deposit | 16S rDNA |
|---|---|---|---|---|
| Strain | Species | Activity | Number | SEQ ID NO: |
| SSP459B9-3 | Pseudomonas | SBL, FAW, CEW, | NRRL B-67639 | 2 |
| | chlororaphis | VBC, ECB, WCRW | | |
| JH59178-1 | Burkholderia | SBL, FAW, CEW, | NRRL B-67640 | 3 |
| | rinojensis | VBC, ECB, WCRW | | |
| JH97285-1 | Chromobacterium | SBL, FAW, CEW, | NRRL B-67641 | 4 |
| | haemolyticum | VBC, ECB, WCRW | | |
| JH91791-1 | Chromobacterium | SBL, FAW, CEW, | NRRL B-67642 | 5 |
| | haemolyticum | VBC, ECB, WCRW | | |
| PMC3591F10-1 | Chromobacterium | SBL, FAW, CEW, | NRRL B-67643 | 6 |
| | haemolyticum | VBC, ECB, WCRW | | |
| PMCJ4191H4-1 | Chromobacterium | SBL, FAW, CEW, | NRRL B-67644 | 7 |
| | haemolyticum | VBC, ECB, WCRW | | |
| PMCJ4232B7-1 | Chromobacterium | SBL, FAW, CEW, | NRRL B-67645 | 8 |
| | haemolyticum | VBC, ECB, WCRW | | |

[0180] These strains were cultured as described in Example 1 and the cultures were diluted to 2, 4, 8, 16, 32, 64, and 128 folds, and tested on multiple insects. The results were summarized in FIG. 3.

### EXAMPLE 11

### Identification of Depsipeptide Biosynthesis Pathway Genes

[0181] Further analysis of the biosynthesis pathway of these strains revealed that there are two different pathways which produce the two types of depsipeptides FR901375 and FK228. Pseudomonas chlororaphis strain SSP532D1b and SSP459B9-3 produce depsipeptide FR-901375; Burkholderia rinojensis strain JH58178-1, and Chromobacterium haemolyticum strain JH97285-1, JH91791-1, PMC3591F10-1, PMCJ4191H4-1, and PMCJ4232B7-1 produce depsipeptide Fk228. Multiple genes, including but not limited to DepA, DepB, DepC, DepD, DepE, DepF, DepG, DepH, DepI, DepJ, DepK, DepL, and DepM, are involved for the depsipeptide biosynthesis (FIG. 1). The percentage of sequence alignment of some of these genes are illustrated in FIGS. 4-7.

TABLE 7
Depsipeptide producing strains and depsipeptide types

| | | | Depsipeptide |
|---|---|---|---|
| Strain ID | Species | NRRL# | type |
| SSP532D1b | Pseudomonas chlororaphis | NRRL B-67638 | FR901375 |
| SSP459B9-3 | Pseudomonas chlororaphis | NRRL B-67639 | FR901375 |
| JH59178-1 | Burkholderia rinojensis | NRRL B-67640 | FK228 |
| JH97285-1 | Chromohacterium haemolyticum | NRRL B-67641 | FK228 |
| JH91791-1 | Chromohacterium haemolyticum | NRRL B-67642 | FK228 |
| PMC3591F10-1 | Chromohacterium haemolyticum | NRRL B-67643 | FK228 |
| PMCJ4191H4-1 | Chromohacterium haemolyticum | NRRL B-67644 | FK228 |
| PMCJ4232B7-1 | Chromohacterium haemolyticum | NRRL B-67645 | FK228 |

The application's sequence listing, which the Patent Office published only in electronic form, follows.

SEQUENCE LISTING (210 sequences)

SEQ ID NO: 1 - DNA, 1533 bp, Pseudomonas chlororaphis
ctgaagagtttgatcatggctcagattgaacgctggcggcaggcctaacacatgcaagtcgagcggtagagagaagcttgcttctcttgagagcggcggacgggtgagtaatgcctaggaatctgcctggtagtgggggataacgttcggaaacggacgctaataccgcatacgtcctacgggagaaagcaggggaccttcgggccttgcgctatcagatgagcctaggtcggattagctagttggtgaggtaatggctcaccaaggcgacgatccgtaactggtctgagaggatgatcagtcacactggaactgagacacggtccagactcctacgggaggcagcagtggggaatattggacaatgggcgaaagcctgatccagccatgccgcgtgtgtgaagaaggtcttcggattgtaaagcactttaagttgggaggaagggtacttacctaatacgtgagtattttgacgttaccgacagaataagcaccggctaactctgtgccagcagccgcggtaatacagagggtgcaagcgttaatcggaattactgggcgtaaagcgcgcgtaggtggttcgttaagttgaatgtgaaatccccgggctcaacctgggaactgcatccaaaactggcgagctagagtatggtagagggtggtggaatttcctgtgtagcggtgaaatgcgtagatataggaaggaacaccagtggcgaaggcgaccacctggactgatactgacactgaggtgcgaaagcgtggggagcaaacaggattagataccctggtagtccacgccgtaaacgatgtcaactagccgttgggagccttgagctcttagtggcgcagctaacgcattaagttgaccgcctggggagtacggccgcaaggttaaaactcaaatgaattgacgggggcccgcacaagcggtggagcatgtggtttaattcgaagcaacgcgaagaaccttaccaggccttgacatccaatgaactttccagagatggattggtgccttcgggaacattgagacaggtgctgcatggctgtcgtcagctcgtgtcgtgagatgttgggttaagtcccgtaacgagcgcaacccttgtccttagttaccagcacgtaatggtgggcactctaaggagactgccggtgacaaaccggaggaaggtggggatgacgtcaagtcatcatggcccttacggcctgggctacacacgtgctacaatggtcggtacagagggttgccaagccgcgaggtggagctaatcccataaaaccgatcgtagtccggatcgcagtctgcaactcgactgcgtgaagtcggaatcgctagtaatcgcgaatcagaatgtcgcggtgaatacgttcccgggccttgtacacaccgcccgtcacaccatgggagtgggttgcaccagaagtagctagtctaaccttcgggaggacggttaccacggtgtgattcatgactggggtgaagtcgtaacaaggtagccgtaggggaacctgcggctggatcacctcctt

SEQ ID NO: 2 - DNA, 1533 bp, Pseudomonas chlororaphis; identical to SEQ ID NO: 1

SEQ ID NO: 3 - DNA, 1530 bp, Burkholderia rinojensis
ctgaagagtttgatcctggctcagattgaacgctggcggcatgccttacacatgcaagtcgaacggcagcacgggtgcttgcacctggtggcgagtggcgaacgggtgagtaatacatcggaacatgtcctgtagtgggggatagcccggcgaaagccggattaataccgcatacgatctacggatgaaagcgggggatcttcggacctcgcgctatagggttggccgatggctgattagctagttggtggggtaaaggcctaccaaggcgacgatcagtagctggtctgagaggacgatcagccacactgggactgagacacggcccagactcctacgggaggcagcagtggggaattttggacaatgggggaaaccctgatccagcaatgccgcgtgtgtgaagaaggccttcgggttgtaaagcacttttgtccggaaagaaatcctttgggctaataccccggggggatgacggtaccggaagaataagcaccggctaactacgtgccagcagccgcggtaatacgtagggtgcgagcgttaatcggaattactgggcgtaaagcgtgcgcaggcggtttgttaagacagatgtgaaatccccgggcttaacctgggaactgcatttgtgactggcaagctagagtatggcagaggggggtagaattccacgtgtagcagtgaaatgcgtagagatgtggaggaataccgatggcgaaggcagccccctgggccaatactgacgctcatgcacgaaagcgtggggagcaaacaggattagataccctggtagtccacgccctaaacgatgtcaactagttgttggggattcatttccttagtaacgtagctaacgcgtgaagttgaccgcctggggagtacggtcgcaagattaaaactcaaaggaattgacggggacccgcacaagcggtggatgatgtggattaattcgatgcaacgcgaaaaaccttacctacccttgacatggtcggaatcctgaagagattcgggagtgctcgaaagagaaccgatacacaggtgctgcatggctgtcgtcagctcgtgtcgtgagatgttgggttaagtcccgcaacgagcgcaacccttgtccttagttgctacgcaagagcactctaaggagactgccggtgacaaaccggaggaaggtggggatgacgtcaagtcctcatggcccttatgggtagggcttcacacgtcatacaatggtcggaacagagggttgccaacccgcgagggggagctaatcccagaaaaccgatcgtagtccggattgcactctgcaactcgagtgcatgaagctggaatcgctagtaatcgcggatcagcatgccgcggtgaatacgttcccgggtcttgtacacaccgcccgtcacaccatgggagtgggttttaccagaagtggctagtctaaccgcaaggaggacggtcaccacggtaggattcatgactggggtgaagtcgtaacaaggtagccgtatcggaaggtgcggctggatcacctccttt

SEQ ID NO: 4 - DNA, 1533 bp, Chromobacterium haemolyticum
ctgaagagtttgatcctggctcagattgaacgctggcggcatgctttacacatgcaagtcgaacggtaacagggtgcttgcaccgctgacgagtggcgaacgggtgagtaatgcatcggaatgtaccgtgtaatgggggatagctcggcgaaagccggattaataccgcatacgccctgagggggaaagtgggggaccgtaaggcctcacgttatacgagcagccgatgtctgattagctagttggtgaggtaaaggctcaccaaggcgtcgatcagtagcgggtctgagaggatgatccgccacactgggactgagacacggcccagactcctacgggaggcagcagtggggaattttggacaatgggcgcaagcctgatccagccatgccgcgtgtctgaagaaggccttcgggttgtaaaggacttttgtccgggagcaaatcctagtggttaataaccgctgggtctgagagtaccggaagaataagcaccggctaactacgtgccagcagccgcggtaatacgtagggtgcaagcgttaatcggaattactgggcgtaaagcgtgcgcaggcggttgtgcaagtctgatgtgaaagccccgggcttaacctgggaacggcattggagactgcacgactagagtgcgtcagaggggggtagaattccgcgtgtagcagtgaaatgcgtagagatgcggaggaataccgatggcgaaggcagccccctgggatgacactgacgctcatgcacgaaagcgtggggagcaaacaggattagataccctggtagtccacgccctaaacgatgtcaactagctgttgggggtttgaatccttggtagcgtagctaacgcgagaagttgaccgcctggggagtacggccgcaaggttaaaactcaaaggaattgacggggacccgcacaagcggtggatgatgtggattaattcgatgcaacgcgaaaaaccttacctggtcttgacatgtaacgaacgctgcagagatgtggtggtgcccgaaagggagcgttaacacaggtgctgcatggctgtcgtcagctcgtgtcgtgagatgttgggttaagtcccgcaacgagcgcaacccttgccattagttgccatcattaagttgggcactctaatgggactgccggtgacaaaccggaggaaggtggggatgacgtcaagtcctcatggcccttatgaccagggcttcacacgtcatacaatggtcggtacagagggtcgcgaagccgcgaggtggagccaatctcataaaaccgatcgtagtccggatcgcactctgcaactcgagtgcgtgaagtcggaatcgctagtaatcgcagatcagcatgctgcggtgaatacgttcccgggtcttgtacacaccgcccgtcacaccatgggagtgagtttcaccagaagtgggtaggctaaccgtaaggaggccgcttaccacggtgggattcatgactggggtgaagtcgtaacaaggtagccgtaggggaacctgcggctggatcacctccttt

SEQ ID NO: 5 - DNA, 1533 bp, Chromobacterium haemolyticum
ctgaagagtttgatcctggctcagattgaacgctggcggcatgctttacacatgcaagtcgaacggtaacagggtgcttgcaccgctgacgagtggcgaacgggtgagtaatgcatcggaatgtaccgtgtaatgggggatagctcggcgaaagccggattaataccgcatacgccctgagggggaaagtgggggaccgaaaggcctcacgttatacgagcagccgatgtctgattagctagttggtgaggtaaaggctcaccaaggcgtcgatcagtagcgggtctgagaggatgatccgccacactgggactgagacacggcccagactcctacgggaggcagcagtggggaattttggacaatgggcgcaagcctgatccagccatgccgcgtgtctgaagaaggccttcgggttgtaaaggacttttgtccgggagcaaatcctagtggttaataaccgctgggtctgagagtaccggaagaataagcaccggctaactacgtgccagcagccgcggtaatacgtagggtgcaagcgttaatcggaattactgggcgtaaagcgtgcgcaggcggttgtgcaagtctgatgtgaaagccccgggcttaacctgggaacggcattggagactgcacgactagagtgcgtcagaggggggtagaattccgcgtgtagcagtgaaatgcgtagagatgcggaggaataccgatggcgaaggcagccccctgggatgacactgacgctcatgcacgaaagcgtggggagcaaacaggattagataccctggtagtccacgccctaaacgatgtcaactagctgttgggggtttgaatccttggtagcgtagctaacgcgagaagttgaccgcctggggagtacggccgcaaggttaaaactcaaaggaattgacggggacccgcacaagcggtggatgatgtggattaattcgatgcaacgcgaaaaaccttacctggtcttgacatgtaacgaacgccgcagagatgtggtggtgcccgaaagggagcgttaacacaggtgctgcatggctgtcgtcagctcgtgtcgtgagatgttgggttaagtcccgcaacgagcgcaacccttgccattagttgccatcattaagttgggcactctaatgggactgccggtgacaaaccggaggaaggtggggatgacgtcaagtcctcatggcccttatgaccagggcttcacacgtcatacaatggtcggtacagagggtcgcgaagccgcgaggtggagccaatctcataaaaccgatcgtagtccggatcgcactctgcaactcgagtgcgtgaagtcggaatcgctagtaatcgcagatcagcatgctgcggtgaatacgttcccgggtcttgtacacaccgcccgtcacaccatgggagtgagtttcaccagaagtgggtaggctaaccgtaaggaggccgcttaccacggtgggattcatgactggggtgaagtcgtaacaaggtagccgtaggggaacctgcggctggatcacctccttt

SEQ ID NO: 6 - DNA, 1533 bp, Chromobacterium haemolyticum
ctgaagagtttgatcctggctcagattgaacgctggcggcatgctttacacatgcaagtcgaacggtaacagggtgcttgcaccgctgacgagtggcgaacgggtgagtaatgcatcggaatgtaccgtgtaatgggggatagctcggcgaaagccggattaataccgcatacgccctgagggggaaagtgggggaccgtaaggcctcacgttatacgagcagccgatgtctgattagctagttggtgaggtaaaggctcaccaaggcgtcgatcagtagcgggtctgagaggatgatccgccacactgggactgagacacggcccagactcctacgggaggcagcagtggggaattttggacaatgggcgcaagcctgatccagccatgccgcgtgtctgaagaaggccttcgggttgtaaaggacttttgtccgggagcaaatcccagtggttaatacctactggggctgagagtaccggaagaataagcaccggctaactacgtgccagcagccgcggtaatacgtagggtgcaagcgttaatcggaattactgggcgtaaagcgtgcgcaggcggttgtgcaagtctgatgtgaaagccccgggcttaacctgggaacggcattggagactgcacgactagagtgcgtcagaggggggtagaattccgcgtgtagcagtgaaatgcgtagagatgcggaggaataccgatggcgaaggcagccccctgggatgacactgacgctcatgcacgaaagcgtggggagcaaacaggattagataccctggtagtccacgccctaaacgatgtcaactagctgttgggggtttgaatccttggtagcgtagctaacgcgagaagttgaccgcctggggagtacggccgcaaggttaaaactcaaaggaattgacggggacccgcacaagcggtggatgatgtggattaattcgatgcaacgcgaaaaaccttacctggtcttgacatgtaacgaatccttgagagattgaggagtgcccgaaagggagcgttaacacaggtgctgcatggctgtcgtcagctcgtgtcgtgagatgttgggttaagtcccgcaacgagcgcaacccttgccattagttgccatcattaagttgggcactctaatgggactgccggtgacaaaccggaggaaggtggggatgacgtcaagtcctcatggcccttatgaccagggcttcacacgtcatacaatggtcggtacagagggtcgcgaagccgcgaggtggagccaatctcataaaaccgatcgtagtccggatcgcactctgcaactcgagtgcgtgaagtcggaatcgctagtaatcgcagatcagcatgctgcggtgaatacgttcccgggtcttgtacacaccgcccgtcacaccatgggagtgagtttcaccagaagtgggtaggctaaccgtaaggaggccgcttaccacggtgggattcatgactggggtgaagtcgtaacaaggtagccgtaggggaacctgcggctggatcacctccttt

SEQ ID NO: 7 - DNA, 1533 bp, Chromobacterium haemolyticum
ctgaagagtttgatcctggctcagattgaacgctggcggcatgctttacacatgcaagtcgaacggtagcagggtgcttgcaccgctgacgagtggcgaacgggtgagtaatgcatcggaatgtaccgtgtaatgggggatagctcggcgaaagccggattaataccgcatacgccctgagggggaaagtgggggaccgaaaggcctcacgttatacgagcagccgatgtctgattagctagttggtgaggtaaaggctcaccaaggcgtcgatcagtagcgggtctgagaggatgatccgccacactgggactgagacacggcccagactcctacgggaggcagcagtggggaattttggacaatgggcgcaagcctgatccagccatgccgcgtgtctgaagaaggccttcgggttgtaaaggacttttgtccgggagcaaatcctagtggttaatacctactggggctgagagtaccggaagaataagcaccggctaactacgtgccagcagccgcggtaatacgtagggtgcaagcgttaatcggaattactgggcgtaaagcgtgcgcaggcggttgtgcaagtctgatgtgaaagccccgggctcaacctgggaacggcattggagactgcacgactagagtgcgtcagaggggggtagaattccgcgtgtagcagtgaaatgcgtagagatgcggaggaataccgatggcgaaggcagccccctgggatgacactgacgctcatgcacgaaagcgtggggagcaaacaggattagataccctggtagtccacgccctaaacgatgtcaactagctgttgggggtttgaatccttggtagcgtagctaacgcgagaagttgaccgcctggggagtacggccgcaaggttaaaactcaaaggaattgacggggacccgcacaagcggtggatgatgtggattaattcgatgcaacgcgaaaaaccttacctggtcttgacatgtaacgaatccttgagagattgaggagtgcccgaaagggagcgttaacacaggtgctgcatggctgtcgtcagctcgtgtcgtgagatgttgggttaagtcccgcaacgagcgcaacccttgccattagttgccatccttaagttgggcactctaatgggactgccggtgacaaaccggaggaaggtggggatgacgtcaagtcctcatggcccttatgaccagggcttcacacgtcatacaatggtcggtacagagagtcgcgaagccgcgaggtggagccaatctcataaaaccgatcgtagtccggatcgcactctgcaactcgagtgcgtgaagtcggaatcgctagtaatcgcagatcagcatgctgcggtgaatacgttcccgggtcttgtacacaccgcccgtcacaccatgggagtgagtttcaccagaagtgggtaggctaaccgtaaggaggccgcttaccacggtgggattcatgactggggtgaagtcgtaacaaggtagccgtaggggaacctgcggctggatcacctccttt

SEQ ID NO: 8 - DNA, 1533 bp, Chromobacterium haemolyticum
ctgaagagtttgatcctggctcagattgaacgctggcggcatgctttacacatgcaagtcgaacggtaacagggtgcttgcaccgctgacgagtggcgaacgggtgagtaatgcatcggaatgtaccgtgtaatgggggatagctcggcgaaagccggattaataccgcatacgccctgagggggaaagtgggggaccgcaaggcctcacgttatacgagcagccgatgtctgattagctagttggtgaggtaagagctcaccaaggcgtcgatcagtagcgggtctgagaggatgatccgccacactgggactgagacacggcccagactcctacgggaggcagcagtggggaattttggacaatgggcgcaagcctgatccagccatgccgcgtgtctgaagaaggccttcgggttgtaaaggacttttgtccgggagcaaatcctagtggttaataaccgctgggtctgagagtaccggaagaataagcaccggctaactacgtgccagcagccgcggtaatacgtagggtgcaagcgttaatcggaattactgggcgtaaagcgtgcgcaggcggttgtgcaagtctgatgtgaaagccccgggcttaacctgggaacggcattggagactgcacgactagagtgcgtcagaggggggtagaattccgcgtgtagcagtgaaatgcgtagagatgcggaggaataccgatggcgaaggcagccccctgggatgacactgacgctcatgcacgaaagcgtggggagcaaacaggattagataccctggtagtccacgccctaaacgatgtcaactagctgttgggggtttgaatccttggtagcgaagctaacgcgagaagttgaccgcctggggagtacggccgcaaggttaaaactcaaaggaattgacggggacccgcacaagcggtggatgatgtggattaattcgatgcaacgcgaaaaaccttacctggtcttgacatgtaccgaacgccgcagagatgtggtggtgcccgaaagggagcggtaacacaggtgctgcatggctgtcgtcagctcgtgtcgtgagatgttgggttaagtcccgcaacgagcgcaacccttgccattagttgccatcattaagttgggcactctaatgggactgccggtgacaaaccggaggaaggtggggatgacgtcaagtcctcatggcccttatgaccagggcttcacacgtcatacaatggtcggtacagagggtcgcgaagccgcgaggtggagccaatctcataaaaccgatcgtagtccggatcgcactctgcaactcgagtgcgtgaagtcggaatcgctagtaatcgcagatcagcatgctgcggtgaatacgttcccgggtcttgtacacaccgcccgtcacaccatgggagtgagtttcaccagaagtgggtaggctaaccgtaaggaggccgcttaccacggtgggattcatgactggggtgaagtcgtaacaaggtagccgtaggggaacctgcggctggatcacctccttt

SEQ ID NO: 9 - DNA, 5025 bp, Pseudomonas chlororaphis
atgagcattccttgcagcgaacaacctcgtgttctgcctcgtctttccctggcagagcaattaatgtcgcgtgctgataccttcccagatctgctggcttttgcttcgctggatcaatcgaagggcatatcgctgacaaatgcggacctttgcgagcgtgcagcggctattgcttatcgtctggcgcaaagaacctcacccggtgaccgggtattgctggcttatgacaatccccttgagtttattccggcattttttggttgttgtttctccggcacgattgccgtacccgttgctcctcgaaccaatggcgaaactgtagcggccattgttcaagattgtggcgggacacttgcgttaactgctcaaggacgtgagggacctccggggattgactggctgcaaacggacaacaatgatcggcgctctccttttatgcgcctggcggccgacaataatccagcgctgctccagtacacctcgggctccacacgaacaccgcgaggcgttgctgtaactcaggcgagcctacggacgacgatcgaagatctcgatcgcgcagctctgcacgatgcccagagtgtgatggtgagctggctgccgtactttcatgatatgggcttggtgtacggtattcttacgcccttgtattgcggtttcaccgcttacttgatgcctccggagagtttcattgcgcagccgttgtcatggttgcgagcgatggcatcggtgcgtggtactcatacggcagcgcccaattttgcctacgccttgtgtgcagatcgggcggctgatctggcacctggaaccgacctttcttcaatgcgatttgcgctcaatggcgcagagccggttcggtgcgacagcgtgcgccgattcgtaacagcttttgctccctttggaatgcctgcttccgtggtcatacctgggtatgggttggcggaggcgaccttgaaagtggcatcgggacgttgcggcgaaggcacacgcagtcgctgtttcgagcccgccgcgctggccgctggacgggttgttccctgtcaccagggcattgagctggcgtcatgcggtaccagctcggtaggaacaagcattgtgattgtcgatcccgccacgcttgttccttgcaaacctgatgtggttggcgaaatttgggttgctgggcaaagtgttgcagatggctattggtcccgtgagagcgaaacacgggaaatattccaagcttgcctggctaccggaggagggccatggcttcgtacgggcgatcttggttttcttcagcaagacgagctctttgtcgtggggcgactgaaggatctgatcattgtcggcggccgtaatatctactgccacgaccttgaggattcggtctcggagtgccaccccgatattcgtaaaggccgcgtatttgcagtagccatagaaggggaggacggtgaagcggttctcatcggtgcagaggtgcgtagcagctgtaaagagggtgatacacgagacatcctctcgcgtattcgcacggagctgaaggtcaggcatgacataggcgcgctgcgtatcgttctgcttcggcgggggagtatcctgcgcacatcaagtggtaaaacccgtcgtgctgcaacacgtgatgccctgtttcgcggtgagttgcaggtcgttgctgactcccatcgtcaatccgtcgaagctgacgacgatatccttctagagattgctcgcttcgtgccgggcgctgtgggcgagcgcaccagcaggctgattgatgctgggctcgactcgctttcagctgctcggctagccgcggcgatttactcgcgttacggtgtaaggctcaagttcgagacgttgtatacggcatcggccgatagtctgtgcagggacattgccaatgcgcaaagtgctgcagtcgcagagcctttggcttcgcacgctatagattgcgcacagccgtttgagttgtccgaaatgcagcaagcctattggatcggccaacagagtggtgttcccctcggcagtgttcaaccacacattcgtgttgattttgaagttgatcactcccaggtctcctctctgagcctgaggttggctgcgctggtggcagcccatccggctttgcggatgtccgtgcaagaggatggccgtgcggtcatcgatccgcgcgggtacgcccccgtcatcgctcatcgagacttgcggggtctcggacagcaagccataagcgccggattgagcgcggcgcgcgaggagctcgcccaggacaatcgtcatcctctgagcgtctgtttcacgcgccttacggatgccaagacggtgttgcatttgcgtctggggttgcttgctggcgacctgcggagcttgttgctccttgttcgggagttggttgacggtccttccttggtatcgggtttcaggagggtggggacggctacctcctgcgtgccgtttgaatgtcgcgaagcctggctgaagaaggtggagtcaatcgcgcctgcgcctgatttaccgcaggcgatggctgccacggatattgatgcccctcgctttgtaatgtgccgacaggagctgtcggaagagctgacaacagccttggcattgaatgcacaggcgcttggggtcacgctctcgtcaatctgtatggctgcctttgttgacgtcttgcgtttatggtctgcatcgccagctctcaccatcaatgtgacttgcagtacacgatcaggacaggccgagcaggccattggcgacttcacgagcagtaccctgttgtctttgcgcgaaccccatgactccttcgccgactttgcccaggcgatccagcaacagatatggcgtgacctggacgagccctggtccacaggtgtttcgatgctccgtgaactcagtcgccgcaatggtgcgccggttctgatgcctatagtcgtgaccagtcttctgtcgggcgatcaggctgacgacctttcggttcttgactcgatcgggcctatggtcgacgtctccaatccgaccccgcaagtatcgctgcacaacatcctggcgcgacgcgatggacgtttgctgatgatgtgggagtatgtggagcagttattccctgccgggttgatcgagacgatgtttgcatcgtttgtggaggtgctcacgacgatcgccaccaggccctctgcggtcgaatatccggtactcgccaagattccagccagtcagcaagcacggcacctgaaggcgaattcgacgagctgcgacaggtccccgcgtcgattggctacgccgtttataacccacgcaactgaaagcccggacgcgatcgcggtagtcttcggtgatctactcaccacctacggtgacttgcggcaagatgccgaggacattgcggccaggttgcaacgcaaaggcgtcaggcgcggggatgtgattgcagccattgtcgaacctggtccaagggctgtggcagcattgattgggatcggcatcgctggagcggtctatctccccattgagccgtcctggccgctgacgagaattgaagagctcctgtacgaatccaaggccgggtatgcggtgctgacacacagcatgaacctgtcgataccgacgctgcagcttgatcagcaaccgggtcggctccggcctgaaccggtggatggggactcgagcgatgttgcgtatgtgattttcacctcgggctcgacggggcgtcccaaaggtgtggttatcacccatgaggctgcggcgaacaccatagatgatatcaacgagcgcttctcggtcggcccgagggatcgagcactgtgcgtctcatcactggcgtttgacctttccgtctacgatattttcggattgctcgcggtaggtggtgccgtagtgtttcccgagcgatcccgcgatccggacgcaattgcgcaagcattgacgactgctggagtaacgatttggaactcggtacctgcagtccttgagctcttgcttgatgtcgctgcgcctcattcgtccagtttgcgactcgtcttgctcagtggcgattggattgcaccagctcttacggcacgtatccgtcaggtgtttacgggagcccagcccatcagccttggtggcgcaacagaggtctcaatctggtcagtcattcaccccatcgttcctagcgacgcggtactgctctcaattccatacgggacaccgctctcaaatcaacaatgttttgtgcgcgcccctgacggacgtgagcgccctgacggcgtggccggggaattgctactgggtggaagaggcttggccctggcttattgcggtaacgatgcagaaaccaaccggcgctttttcaccgataaggatggcaatcgcctctatcggactggtgatctcgcacgatggatgtcgactggcgaacttgaactgcttgggcgtatggacaatcaagtcaaggttcagggttatcgcattgaactgggtgagattgaagctgtcgcgatgaaggcaggtggtatttctcgggctgtggcctcggtcgttcgacgcagcggggcgacggtaatccagctccatgtgcttgcgtcgcaggaagtgcccggcgaggtagtgacctcagtgcgtgctgctcttgctctccatctaccaacctatatgcaaccgcatcatgtgggggtactcgacgttctgcccttgaccgcgaacggtaaggtggaccgctcacggctgcccgcgccacctgagccgaagccggtacggccggtgcgtggcgatgttttgctcgaaacgatgatgatgcaggcctatgtcgaagtggtgggtattggcattgaccctcaacagcgattcttcgatgcgggggcgacttcactgcacattgtgcgtttgcgcgcactgctggagtctcgtgggatagcggttccgtcgctggctgatttcttctcgcttgcgactattcgatcagttgccacttcctccttagcgacgagtaccggtgccaactccaatcagaacgatattgcttacatacgcgcttacaagcaacgcgtgcgggcgcgcaggggagagttg

SEQ ID NO: 10 - DNA, 4683 bp, Pseudomonas chlororaphis
atggacaaggatatacctgttgacgctgtagcaatcattggcgctggctgccgggttcctggggcaaccacgttggaacagttctggtcagttatagccggcggtcaggtgacgattgagcgcttcaccgcagacgcagcacgacgcgaaggtgtgcccgaggcggtattgtcccaacccggttttatcggggcgggaggcacgattgaaaatattgatatgttcgatgccgcgttgtttgggattgccccttctcaagcagcatttatggaccctcaacaacgggtttttcttgaatgcgtccatgacgcactagagcatgctgggcacggtgcggctcgaggcccacgcatcgggatctgggcaggttctgcgagccttgattatttgaccgaccatgtcttgggacaactggatcgctcagcaccgaaccgctacctgcaacaatgggtaggcgttgacaaggattacctggctgcacaagtggcttaccgcatggattttggcggcccggcaatcacggtacagaccgcctgttccacttcactggttgctgtcgtactcgccgtccagggattgttgagttaccagtgcgacattgccgtggcgggaggtgccagcattgggttaccacaacggcaggggtatgtgcatgaggacggcagtattcttgccgcagatggcgcatgtcgcccctttactacacaaagtagcggcaccgtgtttggtaacggtgccggtgcagtgatcttgcggcggctggaagatgcgcttgacgacggggattctattctggctgtgattcgcggtgcagccatcaataatgacggggctgccaaagtaggttttaccgcgcctggaggccgggggcagggcgatgtaatccggacagctcttgcgctcggtgaagttgacggtgcctcgattgagtatgttgagactcatggtacagggactgccattggggatgcggtggagctttcggcgttgacgagtgcattaggggaccgacagcttggtggtccgcgttgtgctattggctcggtcaaggcgaatgttggacatatgaatgcagcagcaggcgtgtgtggtttgatcaaagtcgcactcgccgttcagcatgcccagattcctccgaccgtgggggccgcgcatgcgatcgacgagttacgtggaggatccccctattacctgccaactgatctgactccctggagtaccccgggtcggcgggcgggagtcagttcgttcggtattggcggtaccaatgcccacgtgatcctggaagcatcacctcgtcgtctggcgcaggtacggagcactgtaccgctgctgctggtttcggcacgtgaggacgctctacgcgagttgtgcgcaaactatgcggcgttcctggaggcggacccagatctctctatcgaagatgtgtgttttacggcagccatcggcaggctaactagggagcgacgtgtagcttttcgctctgagcaccgtggtcagctgatcagctcgctgaaggcgtttgccgacggtaaacaagatgagaatgcattttttaacgaagagcaggagcgtcggcctgaggtcacattcgcctttggtgacacagataatctgggtgcggttatcgacggcattttagtctggcagacgcgcggtgttgtgccctcgattgtttgcggtaccggagccggcctgtttgccgcggctttcgcggctggagccttgagcgctgatgatgcgcgcaactgtaatgcgcaaaatgttgtggcaccgtcactgctttggatcagtgcattctcgggcatggcaattgatagcgtggaggccgtgcataaggagcttgcacaactggcgcatagtcggggggacggtgcctcggctgtggcggcagcgggtgcgacgttggtgctcgagtttggcgacaacgcgctaggtgctgacgtagccggtgtcgcctcatttgcccaggagtcgctcaatgcgattgcaggactctggactggcggtatagatctggacttgacgaaaatctacagcggcgcaaatcgtgtgtcgcttccaacctatccgttccagcgcaagcgtttctggatcgaccctgcgccacgctacgccgatagcggcacttcaacttttcttgggcggcgcacagaggcgccgatgctgcgttccagcttttttgatgcccaatggagcgtggcgaccctgccatttctctgtgatcacatgatttacggcaaggtcatcgtctccggtgcggcgctggcggtgatgatcgctgaaggggtgcgcgaggtgagtaaagcgcacgaattcgctctacacgatctacgttttcctgctgccctggtgattccgcaggggatggggcgtcgggtgcaactgcaacttgtacgtgatgatgacggttttgacgcgacagtattgactcaagaaccatttgaaatccatgccacggccagggtcgaaacgatcacaactgtcagtgtcgtgccatcgcagacggtacagggagaagaaaccccaaccgccttgctggactcgtggttacgcgaccacagtgtggtgatgggcccttcgttcagtcggctatcggacattgttataggtcataacgatgccgtctgttcgatgcggaccgatgctggcgacgacgagtggctgctccatccggggatcctcgattcggccctgcaactgctggcggttgccgcccggccggaggggaataaggcgtttgttcccacccgtattgctcggttgaccatacgtgcccataccgcatcgcagctccgttgttatgccgccgccgatcgtggcctcgctacgctgtttgacgaccacggcgttttggccgagatggtgggcctggaatcacgtgaggtcagtcggaacgaactgctgcgtatcgaaccgctgcgcgatggctactccatcgaatggcggagccagtcgctcgaccgcccgttcgaattaccacagaccgtcgtcgttcttcgggatgcgggtagggttgccgaggagctggcggagatcctgctggctgagggtaagcgtccccttgtggccgacagcccctccgatatctcgttcgagacaaccgactttattatcgattgtcgtggggcagatgcacgagcgacgggacccgatctgagtctgtatgagggcgctttggacctgctcggcacagtcgcgagaaatgaccgcccgtgctgtgtagcaatcgtcctgccagtgaatgtacccagtggggcgccgctccaggcgcttgctcgggtggcggctatggaaacaccttatcttcggacattggcggtacgcgccaacgatgcgcgaaccattcgtcatggtctcgacttttttgatcgagaaacagaagtcatggtcgatggggagggcgtttcggcgccgcgttttcataggtttgatcttccacggcgcactgaagccagtttttcgggtgatgaaacgtggctcattaccggtggccttggtgaactgggtttgcgtgttgcgagctggctcagcgcgctcggggttcggtcgctggtgctcactggccgtcacccacctgatgctgatgctcaggaaacactggctgcatttgagcatgaaggtatcgatgttcaagtgattcaggctgacttggcaaacgacgcagacattgaggcgctgttgcacaagatagatacgacgatgccggctttgcgcggaatttgtcatttggcaggcgtggtcgaggaccggctcatgggcgatgtcacacccgcatcgctgaaagcgacctttgccggtaaagctcagggggcatggttgctgcacaagcggacactgcgctatccactcaaacacttcattctattctcatctgccgctgcggcgtttggtgcaccagggcaggcgacttacgcgatggctaacgcctacctggatgagcttgcggtctatcgtcggtcacaggggatgccggcgctgtcgatcgcatggggcccatggcaagacattggtatggctgctcgtactgctgtcaccgcgaaacgccgattgagccagttggggatcggccagatagaggaggagtgcggtcgtgcgacgttcgagaacatcctattcgccgatctgccagcgcatgccgtcctgcttgcggtagattggcaacgtctggtcggacagtggcctccccaggttccattcagtcgctttgacgacattgtcagcgatattcccggctctgcgagaacgtcctcggtcaatgagctgctcccactgtctgccgatgaacgacggcatcggctgttccagctcatcgccgaggatgtgtcggccgtcacggggacagacctggcgacgctcgatcccgaacgttcgttgtttgagtacgatctcgactcgttgctcattacggacctgcgtttaaagctcgaaaggcgattcggacgtccggttgcagcgactgttattttctctaatcccacggtagctgcgctggctgaccatatggcgcagacggtctttggcgaggcggccattgacgcactgcgtagtgcagccgatcaggctcatctgcccgtgtctgcgtccgctttgcctgagacttcaatacctgaacatctctcacaggaagatgtggtcgaaatgctttcggcgaagctcgaagagctgcgcggagggagcatg

SEQ ID NO: 11 - DNA, 3528 bp, Pseudomonas chlororaphis
atgagtacgaacaatcccactaggctgatgcacgatgcgctgatagagattgaacggctccagcgaaaactgggtggactggagcaacagttgaacgaacccgttgcggtgctcggcatggggtgtcgattttccggtgcagactcgccagaggaattgtggcaactgctacttgccggtacggacggcgttcgagcggtcccggctgaccggtgggatagcgagcgctacttcgacgccgatccggattcggcaggccatatctattgccgcacgggcagttttctagacgatatcgcgtcctttgatcctgggtttttcggtatttcggcgcgagaggcgacgatgcttgatccgcaacagcgaatcctgctggaagttgtatgggaagcggtggagcgatccggtattcctgcctcggcactgaggggcagcgccaccggtgtatttgtcggtgttatgcatcaagattatgcccaccgaattcgcaacgccgctgatgtggacttgtacagcgcttcgggtaacgcagccagcgtgctggccggacgtatatcccatgtgcttgggctgcacgggccgtcgatcacccttgacacagcctgttcatcttcactggttgctgttcatctcgcttgcgctgcattacgcgccggcgaatgcgacatcgctattgtcggtggtgtgaatgtcgtcctttcgccaatttccacagcggcagagtgtcgtgctcatatgttatcggccagtggccggtgccgccccttcgacgactccgcagatggcttcgtccgtggcgaaggatgtggtgtcgttgtgctgcaacggctgagtgatgcgacagcggccggtcgctcgatcgacgccttgatcgcggggtctgccgtcaaccatgacggtcggagcgccgggttgacggtaccgaatgaacacgctcagcgtgaactgatacgagcggcattgcgggccgccaacatcgacgctcaacaggtgcaatatgttgaagcccatgggacgggtacatcactgggcgatccgatcgaagctgcggccctggcatcggtttttgccaaccgtgcgaaaggttcgcctgtgctacttggttcgataaaaagcaatttggggcatctggagggggccgcggggattgctggattgatcaaagctattctttgcgtacgtcacggcgtagtgcctgccacgcttcacgtcctgcagcccaatcgtggtgttgactggcgctcagtgccgcttcggcttgcccggcagaatgagcagatgagtggagccctgcgcgtggcaggtgtcagctcctttggtttcagtgggaccaatgcccatgcgatcgtcgtggcggcaccggtctcccaagctgtacggggagaggtccgctttccacagttattgacagtttcggctaaatcagcggcatcgcttctcatgaatgcggttcgttttgccgagcacctctctgggatcagcgaaaccgaactcgaagatgtctgcttctcgtcccgtgtggcgcggacacatttttcccaccgcctggcagtcgttgcatcgagtgcgcaggagatggccaatgagctgcgccgatttgccctgggagaacagacgacagtggtgtccggtctgacccgtgcaatgtcacctgcaagggatgtcgctggggaagcattgcccgaaacgctggaggccattgcgcaaggttacgttcttggcgcgccagttgatttgaccagacttgcgcctgagcgatgccgcatagtgtcattgccgacctatgcattcgaccggcaaaaatattggctggacgagcagtccggagcaacgcaagcaccgccgctctatcggatagcctggaagcccataccgttggttgcatctgcgctgcgttcaggcagacggatcattgctggaaatgatccgcagctgtgcggtgaaatcgccgcagcactggaagctgcgggcgagcaatgcaccgtagtgggtgcggaggtcgagacaatcctgggggcaggaaatgccaacctaggtgtgatgcttgtagtcgcgggcagcctggcaaccgccgaaccgctggaggcaatcacacaatacggtgcccttatcatcgagttggctcaagcactcgcgctgaacccatccttgggccccgtggtggtggtcacacgaggggcgacctttaccgggccggcggaggaagttaaccctgtcgtcgcggccatcaacgcagcggtgcgtgttgcacgccgtgagcagggggcgctttggggcaggtcggttgacatcgatggatcacaacagtcacttgcaacgcttgcggccatgctgggtacagttgaagacggcgaggaggaggtcgctattcgcgcggctgtcatcctcgtacctcgactgcgccgtaccgggacctgtgaggtgatgcctgacattgcggctgatggtgtgtatgtcatcaccggcggtacaggcgccctcggcctggcttccgcgtgttggctggcgagccgtggggcgcgccatcttttgttaatcagccgtcggggcgaacaggaacaagacgtgcgcgcgagctgcgatcaactgcgcagcgacggtgtcgatgtgcgtgtggcctgtgccgatgtagcggatgaggtatcactgcgcagtgcgttggcactggcagaccgccccgttcgtggcgttatccattgtgccggtgtgattgacgactcctccctggtcaccatgacgtcggcaacattcgccggggtgttacgcgccaaggtgggaggggccgacctgcttgaccggctgacagttaaccagcccgtcgatctgtttcttcttttctcgtcgatctcggtcgcacttgggcgccatggccaggcggcctacgcggcggccaatgcctacctcgacgcactttcgcaacaacgttgcctgtatggacgtcccgccttgtcagtcggctggggactgtgggcggcaggcatggggactactgaccccaaagtactggagcgaatgcgtgcgagcggcctgcaggcattgaccgaaaccgaggcttttggagcgctggaaaaagcattcaatgtcgatgcacacctcatcatcgcggcgattgatacccagcggatagcttcacagccgaaccttccgcgactgcttgaggggatggttggcggtcaccctccgatgctaaggcccgtatttgatttcgagcaacttcgtgggcacagcgctgatgctcgccgagcattgatcgccgagtacctagggggggagctgcagtttatcttgtccagtgatgtcgagttgtcgcacgacatgtcgctgattgaactggggatggactcccttaccggctcggaactgcgtaacgccatagaacgatcgactggcgtttatgtacctatgcagcacttcatcgatgggtcgccgttgaacaccgtggttgaagtgattgtgggccaacttgagcgccggctcgtgactacccagtcggtgagcccaggtactagcacagagaaaattacccta

SEQ ID NO: 12 - DNA, 13083 bp, Pseudomonas chlororaphis
atgcagttcagcgaattgatggcaattatttccacccagccgatccgtctccaacaggaagaaggcgacctggtcgtgctgggtgacgatgaggggctggacgacgcgctgtgggacagcctggtcaagcacaagtcccgtctgctggacctggtggcccgccatgacggcgactggctgagcccggcctaccgcatcaccccggacatgctgccgctggtcaaactcgaccagccagccatcgaacgcatagtcgccagcgtgccgggcggcgcggccaacgtgcaggacatctacccgctggcgcccctgcaggaaggcatgctctaccaccacctgtcggcgcagcagggcgacccctacgtgctgcacgcgcagttcgccttcgccagccgccaacggctgcaggcctttgccgaggccctgcaatgggtgatcgaacgccatgacatcctgcgcaccgcgatgttctgggagcgcctggacgagccggtgcaggtggtctggcgccaggcccggctggactgcgaagaactgagcttgaataccgccgacggcgacgtgctggagcaattgctggcgcgcttcgatgcccgccactatcgcctcgacctgcgccaggcgccgctgttgcgcctggtcttcgccgaagacccgcaccagcagcgggtggtcggcatgctgctgtttcatcacacggtcatggaccataccgcgctggacctggtgcgtgaggaaatccaggcgcacctgctcggccaatgcgcacaggtggcgccggcggtgccgtttcgcgattacctggcccaggcgcggctgggggcggacgagcaggcgcacgaggcgttcttccgccagatgctcggcgatatcgacgagccgaccctgccgttcggcctgcgggatgtgcagggcgacggccgcggcatcgaagagctgcgcatcagcctcgacgacgggttgagcctgcgcctgcgcggccagtcccggcagttgggggtgagcgccgcgagcctgatgcacctggcgctggccctggtcctgggcaaggcctcggggcgcagtgcggtggtgttcggcaccgtgctgctgggacgcatggacgccggcgaaggggccgagcgcgccctgggcatgttcatcaataccttgccgctgcgggtggatgtcgacgggcatagcgtgcgcgccgcggtgcaggccacccaccagcgcctgaccgcgctgctcgggcatgaacaggcctcgctggccctggcccagcgttgcagcgcggtgagcgcgccgacgccgctgttcagcgccatgctcaactaccggcacagcgccgccggcgacgccgcggcggtgatcgacatcgccgagggcatccaggtgctgggcgccgaggagcgcaccaactacccgctgacggtcaacgtcgatgacctgggagaaggtttccgcctgaccctgatggtcgccgccgagatcggcgccgcgcgcctgggcggctacctgcaaacggccctggaaagcctggtcgcggccctcgaacacaacccggaagcgtcgctgcaaaacctgaacattctgccggcggccgaacgccagcaactgctgttcggcctgaacccagtccggcaattcgccgacagtgccttgatccaccaacaggtggaggcccaggccgcggcccagcccgacgccacggcgttgatccatgaggggcggcagctgagctacggcgagctgaaccgccgcgccaaccagctggcgcaccgcctgctggccctgggcgtgcgcccggacgaccgggtggcgatctgtgtcgagcgcggcctggagatgatcgtcggcctgctgggcatcctcaaggcgggcgccggttatgtgcccatcgacccggcctatccccaggagcgcatcgcctacaccctgcgcgacagcgaaccgctggcgctgctggcccaggccggcacccggcaactgctgggcgagctggcggtgccgctgctcgacctcgacgacccgcagctgaatcagcagccgtcgagtaatccccaggtgccggggctgagcagctcgaacctggcctatgtgatctacacctcgggctccaccggcctgcccaagggcgtgatgatcgagcaccgcaacgtggcgcggctgttctcggcgacccaggacgggttcgccttcaaccgccaggacgtgtgggcgctgttccattcctttgccttcgacttctcggtctgggaaatctggggcgcgctgatccacggcggccggttactggtggtgccgcagctggtcagccgttcgccggacgattgttatgcactgctgtgccaagcctcggtaagcattctcaaccagaccccgagcgccttccgccaactgatcgcggcccaggaacgcagcccgctcaagcattccctgcgccaggtgatcttcggcggcgaagccctggagccgggcattctcaagccctggtatggccggctggaaaacgccggcacgcagctggtgaacatgtacggcatcaccgaaaccacggtgcacgtgacctaccgcgccctgcaggcggcggatgcccagcgcctgggggctagccccatcggtgggcctattcccgacctgcagttgtacgtgctggatgagcggcgcgagccggtgccggtgggggtggtgggcgagctgtatgtcggcggcgccggggtagcgcgggggtacctgaaccgcgaggcgttgaccgccgagcgtttcattgacgatccgttccgcgcggacagcgggcagcgcctgtacaagaccggcgacctggcgcgctggaacgctcagggcgagctggagtacctggggcgtaatgacgatcaggtgaagatccgcgggttccgcatcgaactgggggaaatcgaggcgcggctggcggcttgcgccggcgtgcgcgaggcggtggtgatcgcccgcgaggacgagcccggcgaccagcgcctggtggcctacctgataggtgccgaaggagtcgaactggatgcggcggccctgcgcgaccaactgctgctgtccctggcggactacatgctgcccagcgccttcgtgcaactcgacgccttgccgctgaccaccaacggcaagctcgaccgcaaggccctgccggcgccggacaacacggccctggcccgtcgtggtttcgaggcgccgcagggcgaggtggaacagcgcatcgcggcgatctggcaggagctgctcaaagtcgagcgggtcggccgtcatgacaacttcttcgagctgggcgggcattcgctgctggcggtgaaactgatcgagcgcatgcgccagctggaactgggcgccgatgtgcgggtgctgttcggccagccgaccctcgccgccctggccgccgcggtgggcggtggccgggagatccaggtgccggccaaccgcatcggcgccgactgcagccgcatcaccccggacctgctgcccctggcggacctcgaccaggccgccatcgaccagctcgtcgccggcatccccggcggcgttggcaatgtgcaggacatctacggcctggcgccgttgcaggcgggcatcctctatcaccatctggcgagcgaggaaggcgacccctatgtgctacaggtgcaatgcgccttcagcggccggccccaggtcgaggccttcgtcggcgcgctggacagcgtgatcgagcgccatgacatcctgcgcagcagcgtgcactggcaaggcctcgccgaaccggtgcaagtggtctggcgccaggcgccgctggtggtcgaacagctggaacccgaggcgggcggcgatgtgctgcaccagttgcagcagcgcttcgacccgcggcattaccggctggacctgaaccgcgccgcgctgatgcgttttgcctacgcccgggacgagcagaaccagcgctggctgggtatcttgctgctgcaccatatcctcctggaccacactgcgctggccgggctggtggcggaaatgagtgccagcctcagcggccacactcagcccctgggcgaggccgtgcagtaccgcaactacgtggcccaggcccggctcggggtcagtgaggaggaacacgaagcctttttccgcgagatgctcggcgacatcgacgagccgaccctggccttcggcctgggggacgtcaaccgtgacggcagtggcgtggaagagacgcgcctgcccctggacgcagctttggctcggcgcctgcgcgaacaagcgcgtcagcttggggtcagcgccgccagcctggtgcacctggcctgggcccaggtgctgggccaggtctcgggccgcgacgatgtggtgttcggcaccgtgctgctcgggcggatgcagggcggcgagggcgccgaccgcgccctgggcatgtttatcaataccttgccgctgcgggtcagcctcggcgccgtgggcgtgcgcgacgcggtgcgcgccacccacggccgcctctcgcagttgctcgggcatgaacacgcgtccttgtccctagcccagcgctgcagcagtgtgccggcttcgctgccgctgttcagcagcctgctcaactaccgccacagcgccgccgaagcagtggccacagtggacggcgcggcctgggacggcatccagattctcagttcgcaagagcgcagcaactacccgctggtgctgaatgtcgacgaccgtggcgaagccttcgagctggtggtgcagaccctggccgaggtcggtggccagcgagtggccggttatatgcagacggccttgcagggtctggtggaggccctggagcaggagccggcccggccgttgcgcgagctgagcatcctgccggcggaagaacgccagcgcctgctggtgaccttcaacgccacccagcgcgcctatccccacacccagaccctgcacgccttgttcgaggcccaggcgcggctgcacccgcaggccacggcggcggtgcagggcggccaaagcctgagctacgacgccttgaaccgccgcgccaaccagctggcccaccacctgatcggccttggagtcaaaccgggggacagcgtggcgatcctcctggaacgctccctggacctgctggccagccagttggcggtgagcaagtgcacagcggtctatgtgccgctggacatcaacgcgccggccgagcgccaggccttcatgctcgaagacagcgccgcgcgggtgctgctcagcgacagccgccaggtaacttctcaccgcgtcgcccgggtcgatctggaccgcctgaccctcgacggcttgccagagcacgacctacagctggcgcagtcctccgaggcgctggcctacatcatgtacacctccggttccacgggtacgcccaagggcgtgctggtgccgcaccgggcgatcacccggctggtgatcaacaacggttatgccgacttcaaccgcgacgaccgggtggccttcgcctccaacccggcgttcgacgccagcaccctggaggtctgggcgcccttgctcaacggcggctgcgtggtggtggtcgagcaggacgtgctgctgtcccgcgaggccttcggccagctgttgcaggcacagcaggtcagcgtgctgtggctgaccgccgggctgttccaccagtacgccgatggcctgatgccggcgttcagccgcttgcgttacctgatcgtcggcggcgacgtgctcgacccggcggtaatcggccgggtcctgcaacagggcgcgccacggcacctgctcaacggttatggcccgaccgaggccacgaccttctccaccaccttcgaaataaccgaggtgggcgagggcggcattcccatcggccggccgatcggcaacagccgggcctatgtgctcgacgcccagcagcgcccgctgcccattggtgcggtaggcgagctgtatatcggcggtgccggggtggccaagggttacctgaaccagccggagctgaccgcccaggcgtttattgcagatcctttcagcgaccaaccccaggccttgctgtaccgcaccggcgacctggcctcctggcgcgccgacggcaccttgctgtaccagggccgcaacgaccagcaggtgaagctgcgcggcttccgtatcgagctgggcgaaatcgagacccggctggcggcctgcccgggcgtccaggacgcggtggtgctggcccgcgaggatgagcccggcgacaagcgcctggtggcttatttcaccgccgcggccgatgagtcggcgccgcagctcgacagcctgcgcgcccagctgcaaggccagctccccgattacatggtgccgtcggcctatgtccggctcgaccgcctgccgctgaccgccaacggcaagctggaccgcaaggccttgccggtaccggatcaggcggccttgctcagccgtggtttcgaggcgccgcagggggatgtggaaatcgccctggcgcggatctggcgcgagctgctcaaggtcgagcaggtcggccgccacgatcatttcttcgagctgggcgggcattcgctgctggcggtgagcctgatcgagcgcatgcgccagatcggcctgagcgccgatgtacgtgccctgttcagccagccaagcctggcggccctggccgcggcggtgggcagtggccgggaaatccaggtgccggccaaccgcatccccgcaggctgccagcacatcaccccggagctgttgccgttggtggagctggagcaggccgagatcgagcggatagtcgcccaggtgcccggcggcgcagccaatgtgcaggacatctacccgctggcgccgctgcaggagggcattctttatcaccacctgagtgccgggcagggcgacccctacctgctgcaatcgcgcatggccttcgacagcctggagcgtttgcaggcctttgccggcgccttgcagcaggtgatcgaacgccacgacatcctgcgcactgctgtgctctgggagggcctgaaacagccggtgcaggtggtgtggcgcaaggccgagctgcccttgcaacaagtgccgctggatgtggccggcggcgatgtactggagcagttgcacgcttgcttcgatgcccgccactaccgcctcgacctgacccaggcgccgctgctgcgcatggtctatgcccaggacccggcccagcagcgggtagtggcgatcctgctgttccatcacctggccctggaccacacggccatggccgtggtcggcgaggagatgcgcgccttcatgttcggcgaggccgagcgcctgggcatgcctgtgccttatcgcaactacgtggcccaggcgcgcctgggggcggcggagcaggagcacgaagccttcttccgcgacatgctcggcgatatcgacgagccgaccctgccgttcggtttgcaggatgtgcagggcgacggccgggatatcgaagaggccgagctggccctggacaccgccctgagcctgcgcctgcggaccctggcccggcgcctgggagtgagcgcggcgagcctgatgcacctggcctgggcccaggtgctaggccaggtgtcgagccgccgggatgtggtgttcggcaccgtgctgatgggccgcatgcaaggcggcgagggcgccgaccgcgccctggggatgtttatcaataccttgccgctgcgggtcgatcgcggcctgggggtgcaggccgcggtcaaggccacccacgcccggctgaccgcgctgctggggcacgaacatgcgtccctggccctggcccagcgttgcagtggcgtggccgccggcgcgccgctgttcagcgccttgctcaactatcgccacagcgcgccgcaggagatggcccgatccggccagggcatctggcagggcgtcgaactgctcggcggcgaagagcgcagcaactacccgctaaccctgagcgtcgacgacctgggcgagggcttcggcctgaatgtgctgacgctgtcgagcatcggtgcgcagcgtatcggccagtacatgcagcaggcgctggagcagttggcccaggcgctggagcaggaccccgagctgccgctgcaacgcctgccgatcctgccgcaggcggagtggcaacgcctgctgtcgagcttcaacgccagcgccgcgaactacccgcgcgggcagaccgtccacggcctgttcgaaacccgggccgcgcgtaccccggacgccttcgcgctgctgcagggcgagcagcgcctgacctatcgccagctcaaccagcacgccaaccagctggcctggcacctgctggcccagggcgtgcagccggatgatcgggtagcgatctgtgtgcgccgcggcccgcagatgctgatcggcctgctggcgattctcaaggccggggccggttatgtgccgatcgatccggcctacccggcggagcgcatcgcctacctgttgcgggacagcgcgccggtggcggtgctggcgcaacagcagactcgcgcgctgctgggggacagcctgccagtgatcgatctggcggccaccgactggcaataccgcccggtgaccaatcccggcccggcgctgaccgcggcgcacctggcttatgtgatctacacctcgggctccaccggcttgcccaagggcgtgatggtcgagcaccagaccctggaaaacctggtgcactggcactgcgcggccttcgatttgaagccgggcagccacacctccagcgtcgccggtttcggtttcgacgccatggcctgggaggtctggccggcgctgtgcggcggcgcgaccctgcacctgccgccggccgaggtcggcaacgaacacatcgacgaactgctgagctggtggcgcgggcaaccgctggacgtcagcttcctgccgaccccggtggccgagtacgccttcagccaggacctggaccatccgaccctgcgcacgctgctgatcggtggcgaccgcttgcgccacttcagccgcaaccagcgcttccaggtgatcaacaactacgggccgaccgaggccacggtggtcgccacctccggcaggatcgaggccgggcggccgctgcatatcggcaagcccatggccaacgcgcgcatctacctgctggacgagcagctgcaaccggtgccggtcggcgtggcgggcgagctctacgtgggcggcgccggcgtggcccggggctacctgaaccgggcgcaactgaccgccgagcgtttcctcgacgacccgttcagcgccaattctgtcaacggtggccctgcagcacggatgtaccgcaccggcgacctggcgcgctggctggccgacggcagcatcgagtacctggggcgtaacgacgatcaggtcaaggtgcgtggcatgcgcatcgagctgggggaaatcgaagccgccctggcccgccacgaggcgctgcgcgagtgcgtggtgctggtgcgcgacgggcgcctggtggcctggttcagcgagcaccggcctctggatatcgaggaactgcgcacttatctgcaagggcgtttgcccgactacatgctgccggcggcttatgtgcgcctggacagcctgccgctgaccgccaacggcaagctggaccgcaaggcgctgccggagccggatcaggcggccttgctcagccgcgagtacgaggcgccccagggcgaagtcgaggtgaccctggccgggatctgggccgaggtgctcaaggtcgagcgggtcggccgccacgatcacttctttgagttgggcggccattcgctgctggcggtgagcctgatcgaacgcatgcgccagctgggcctgagcgccgacgtgcgcatcctgttcagccagccgaccctggcggcgctggccgcggcggtcggcagcggccgcgaggtcgaggtgccggccaacctgattcccgccgactgccagcacatcaccccggacctgttgccgttggtggaactgcagcaggccgagatcgaccgtatcgtcgcccaggtccccggcggcgcgaccaatgtgcaggacatctaccccctggcgccgttgcaggaaggcatcctgtatcaccacatcatggcggagcagggcgacccctacctgctgcaatcgcgcatggccttcgacagcctggagcgtttgcaggccttcgccggtgccttgcgccaggtgatcgagcgccacgacatcctgcgtaccgctgtgctctgggaggggctgaaacagccggtgcaagtggtctggcgcgaggcgccgctggtgctgcgcgaggtggcctgcgacacggccaccggcgaggtgctggcccagttgctccagcgtttcgatgcccggcgttaccgcctggagctgacccaggcgccactgatccagctgatgtacgccgccgacccggagcgccagcgcgtggtggcggtattgctgttccaccacctggccatggaccacagcgccctggacgtggtgcgccacgaactccaggccttgctactggaccaggcgcagggcctgggaccggcggtgccgtttcgcaactatgtggcccaggcacgcctgggcaccggcgagcaggcacatgaagccttcttccgcgagatgctcggcgatgtcgacgagccaaccctggctttcggcttgcaggatgtgcagggcgatgggcacgggatcgaggaacggcaactgcgcctgccggcgtccctcgaccagggcctgagaagccaggcgcggcgcttgggggtaagtgccgccagcctgttccacctggcctgggcccaggtgctggcggcggcctcgggcaagcgcaatgtggtgttcggcaccgtgctggtgggccggatgcagggtggtgctggcgccgaccgggcgctgggggtcttcatcaataccttgccgttgcgggtcgatatcgacgagcaggatgtgcgtgccggcgtgcgcgccacccatgcccggttgacggcgttgctggggcacgaacacgcgtccctggccctggcgcaacgttgcagtggcgtcgcggccggcacgccgctgttcagcgccatgctcaactaccgccatagccttaccccgcgccaagagctgcaacacgcctggcaggggatcgaaaccctggccagcgacgagcgcaccaactatccgctgaccctcaatgtcgacgacctgggagatggctaccacctcaccgcgctggttgccgccggagtgggcgcgcaacgggtttgcgactttatgcagactgtgctgcaggggctggtggacgccctggaacagtcgccgcaaaccgccctggaccgcctgccggtgatcaccgccgaggaacgccggcaactgctggtggcgttcaatgccaccgaggcgccttacgaccttgagcagagcattcatgggctgttcgaggcccaggtcgagcgcacgcccgaggcgctggcggtcaaggccggcgagcaatcgctgagctatcgtgccctgaatgagcgggccaaccagctggcgcattacctgcgcgagcagggcgtgggcccggatgcgcgggtggcgatctgcgtcgaacgcgggctggaaatggtggtgggcttgctggcgatcctcaaggccggcggcggttatgtgccgctggatccgtcgtatccgctggagcggatcgcctacatgctggaagacagcgcgccggtggtggtcttggctcagggagcgactcgcggcttgctcggtgacgtgccggtgatcgatctggaccggcctgtgtggcaggatcagccgctcagtaatccagttatcgctgatctgactccgcggcatctggtctacgtgatctacacctccggttccaccggcaagcccaaaggcgtgatgaacgaacaccgcgccgtggtcaaccgcttgctgtggatgcaggaccaatacggcctgtccgccgacgatgcggtgctgcagaaaaccccgttcagcttcgacgtgtcggtctgggaattcttctggcccttgatgaccggcgcacggctggtgatggcccgtcctgagggccataaagaccctgcctacctgtgcgaagtgatccaggccgaacgcatcagcaccttgcactttgtgccgtcgatgctcgacgtattcctggcccatggcgataccgctcgctgcactggactgcggcgcgtgctgtgcagcggcgaggcgctgccgggcagtctggtgcgacggttcaaggcgcaactaccgggcagcgaactgcacaacctttacggcccgaccgaggctgcagtggacgtgaccgcctggaactgcgcggggcctgtggagcaggtcccggacaacacgccgattggcaaaccgatcgccaacacccgcatgtacctgctggatgaacagctgcaaccggtgccgctgggtgtggtgggcgagctgtatatcggcggggtgcaggtggcgcggggttatctgcatcgtcctgaactgacggccgagcgttttctcaaggacccgtttagcgataaagctcaagctcgcatgtaccgcactggtgatgtcggtcgctacctgccggacggcaccatcgaatacctggggcgcaacgacgaccaggtgaagatccgcggcctgcgcatcgagctgggggaaatccaggcgcgcctgacccagttcccggatgtgaaagaggtggtagtcctggcccgcgaagacgtgccgggagacaagcgtctggtggcctattacaccactgaggtttccagcgaacggttggaaaccgaagcgctgcgcagccacctgctggagcaactgccggagtacatggtgccggcgctgttcgtgcacctgccggccttgcccctgagccctaacggcaagctggatcgcaaggccttgccggccccggatctggagtcgctgcgggtacgggaatacgaggcaccgataggcgacacggaaatcctcctggcacggatctgggccgagttgctgaacgtggaacgggtagggcgccacgaccatttcttcgagctgggcgggcattcgctgctggccgtcagcctgattggtcgcttgcgtcaggaaggcatggaagccgatgtcagggcgctgttcgaacagccgaccctggcgggctatgccgcaattaccgaacgaatggagatcgtcctg

SEQ ID NO: 13 - DNA, 13083 bp, Pseudomonas chlororaphis; identical to SEQ ID NO: 12

SEQ ID NO: 14 - DNA, 1173 bp, Pseudomonas chlororaphis
atgatgaatgaccgagtcgcggcatttctagcggttgaggcggcgctggctgcgccggaggcggcactggcgagtggtgattttgctacggtcgagcagttgatgagtgacatccgtggggcaaaccgggcgagggggctttggcttccccagctctctcgagtcaatggcggctcggggctcgacctgctcgaactggtcgaagtcggggaagtgcttggcaggtcgccactgggtcactatgcggttaactatcaggcacctgatgccggtaatatcgacatccttctcgagtacgccacgtctgagcagaaaagacgctggcttgatcctttactgcagggcaaggtccgcagttgctttgcggcgactgagccggacagggccggctcgaacccttctgctctggcgaccaaggctgttttcaaggagggtgcatggcacctcactggccgcaagtggttcgcctcgggtgcagaccgtgcggcatttgcgatcgtgctcgccgttaccgatgagactgcgccgctgcacgcgcgaactagcacctttatcgtaccgactgatgcacccgggtatcggcatgttcgcaatattcgcgtgatgggcgatgaggggtgtggctgggccagccatggtgaaatcgagctggacgactgtcgagtggagacggacgcgttgttgggcgagcttggggctggattcgtcgtcctgcaggcccgccttgccacggggcggctacatcattgcgcgcgctggatcggtgtttgcgagcgcgcgttcgcaattatgtgtcgacgggccagccgccgcgaactcgcaccgggggagtttttgtcgtcgcgccagacggtgcagaactggattgctgaaagccgtgcttcgatcgacgcggcccggctccttgtcgctcaggccgcgtcgcgcttgcagaaacgccatgagcgagcccaagttgacatatcaatagcgaaattttttgtcgccggagtgacccagaacgtccttgatcacgccctgcagatccaaggtgcactaggtgtcagcggtgacacgatcgtaaacgtcctctggcgccatgagcgcgcaggacgcatttatgacgggcctgatgaagtacacaaggcgttggtcgcgcggcatgcgctggccgtgtttcgtggtgagcctcga

SEQ ID NO: 15 - DNA, 966 bp, Pseudomonas chlororaphis
atgagcctccgggtcgcgcacagaacgatgatcgccctgggtaaccccggcgcagccgctctggcgactcgcatcggagcaggtcgatccagtgagacatacttggtgcaggcgaacgatcgcgacctcatcacttatgttttgccgtctggcagtgggcgggaagcacaccgtcgtttcgcagtattggagcggattgctgaacactatcgtctagcgccaaagccgcttgctgtgatggacgtctccgatgaaggtctgtcattactggtgatggagcggctcccagggattttgccgacgacctgcgtttcgcttacgcctgacactgttcgtcgtctctgcgttgggtttatttctgcgctggcgtcattgcatgccattgagattgctcctgttgataggcctccggagtatctgcgtcgcagcattggcgattgggagcggcgctggtgcgaagaagaggccgcaggtgctcacgatgacttcaatgcggtggtgcggtggttgacggataacctgccggaccaggtcgcttcagcttttgtgcacaatgattttaagctggacaacattctggtcgatcccggcgaccctgcacgggtggtcggggtcgttgactgggagttggccaccattggccatcctcttgccgatctagggatcgctttggcctattggattgaacgcggcgactcttcgttgctgcgtctcgatgcgccggggccaagttgtgctttgggggcaccgacccgtcaggaactggtagagctgtatgctgcggccagcggtcgcgaggtacccaatgcctcgtattggtatgtctacggattactgcggctggctgttatcacccagcaactggtgttgcgtcataaagacggtggcccacccgttccccgtggccagctcatcgtacgatcgctcttggttcatgcattgaacacttgtgggagcggacgacta

SEQ ID NO: 16 - DNA, 897 bp, Pseudomonas chlororaphis
atggactatcacgtgatcatcgtcggcggcagctacgccggtctttccgcagggctgcaactagcccgggcgcgccgccgggtgctggtgatcgatgcagccgaacggcgcaaccgctttgccgaaacctcccacggttttctcgggcaggacggtcgctctcccgcgcatattgccgacgaggcccgggaacagttgctggcctacccgacagtggagtggctggcggacaccgcgatcgacgccggccaggaccccgagggtttctggctgagcacccgcggtggccagcgccacagggcccagcggctgatcctggccaccggggtggtcgatgagctgccggaagtcgaaggcctggccgcgcgctggggcaaaagcgtattccattgcccgtactgccacggctatgagttggccggtgggcccatcggcgtgctggcgacttcggaactctcgatgcaccaggcgctgatgctgccggactggggcccgaccaccttgttcatcaatgacgcctttgcgccggatgccgagcaactggccagccttgaacgacgtggtgtgcgggtggaacgcgagcctgtgcggcgcatcgccggcgacaaggccgaggtgatcctggccgatggccgggcgattgcggtcgagggtttgtttgtcgtgccacgtacccgcatggccagcccgctggccggggtgctgggctgtgagttcgaggaggggccgcttggcgcctttatcaagaccgacgcgacccgcgagaccagcgtgcccggggtattcgcctgtggcgacgctgcggcggcattcagctcggtggccatcgccgtgggcgacggggccaagaccggtgcgggtacgcatcgctcgctgatattcggcctggccccggag

SEQ ID NO: 17 - DNA, 828 bp, Pseudomonas chlororaphis
atgcgtacccacagcgacaaagggtctcgcgttgcacaccccccgaagggctggcgcatacgcgagaacactgaggcatgccaaccgttgcgcggcgagtgggtcgagccgcaggacccggctcaacgtgacagactccaccgtgtcgtcatgtacctgcatggtggtggttactgcttttgctctccgaagacccatcgtcggattgcgtacgcattggctagcggtggtgaggcgcgtaccttttcgttggcttaccggctagctccggagcatccattccccgccgcagtcgacgatgccctggccgcctaccggcagctacttgccgaaggtgtctgccctgcgcgcatggtcatttgtggtgactccgcgggtgggggcctggccctggcaatgctgttgtcattgcgtgattcggatgaaccgatgccagcaggtgcggtgctgttttcgccatggacagacctggctgcaacgggagcctcattggcgacgaacaaccagagcgacgtgatgctgacaggcgcagccgtagcaaggttttcccggcattacctgaacgatacgcctgcggaccatcccattgcttcgccactctatgcacagttttctggtttgccgcccttgttcattcaagccagtgacaccgaggtgctgctggatgacgcggtgcgggttgccgaaaaagcccgtctggctcaggttacggtgaatttcaaagtctggccccgtctcccgcatgcctggccgacgatgacccctttcttgccggaggcgaaggcggcagtcaaggaggcagttgaattcatccggagcgtgacggtg

SEQ ID NO: 18 - DNA, 762 bp, Pseudomonas chlororaphis
atgaccatcggaccgcttggctctaaccactgggtcgtacctggcacatcgcctggcaacgctagagtgagattgttctgcctgccttacgcagggggcagcgcagctatctttcgcgactggcctgcacgattggcatcggatatcgaggtgcttcccttgcacctgcctgggcgagggcagcgcatgcatgaagcattgctacatgacctgggtgagatcaccaatcaggtggcggaggccatcgcgccgttgcttgagaagccttatgtcctgttcggtcacagcatgggagcctgcctagcctttgaggttgcgcgccgcctgcgtaccagtggtctgccggagccggcttgtttgatcgtgtctggccacggtgcaccgcatttgccagccagtcgctcgttactacacgggcttcccgatgacgagttcatcgatgaggtgatgcgtttgaacggcacaccacctgaaatactgaaacaccctgaagtggtcgagctgatcctgccaatcctgcgtgccgactttgaggcggtggaaacctacagtatgaccccacagccacctcttacctgtcggattgttgcgctgggaggtgacaacgatcccgatatggataacgacgcggtagcgtcgtggggcatccataccacgaacagtttttattatcagatgcttccaggcgatcactttttcctgcatggcagcgctgaacagatgtttgccttgatcaacaaggaactgcggtctgtgttgctc

SEQ ID NO: 19 - DNA, 840 bp, Pseudomonas chlororaphis
atgatctcggtgcccttgtcgatgtacagcttggccgccagatcgagggtctgctgggaaccgctgaccaccagcacctggctcgcctcgcacggtacgcccagcgcccgggcttgtgccgccagggcctcgcgcagctgtggctcgccctcgctcatgccgtattggcccatggacaacggcatcgcctgccaatcggtcttcggcagcatcgcttcggcgggcaggcctccagcgaacgacatcacttccggacgctgcgcggcggcaaggatttcacggatcagtgagcttttaagacgcgaaacacgttcggagaaggccatgagggtcaccagtagcgaaggcggaggaaaatacgtcaaactgcttgaccgaaattacgccgacctgcgcagatacgtcaatatgcttgaccttaaaaacccgaccacgcaacaagccgccatggaagccttcttctttggttaccaggcgttcaccgccaaggccgatgaaatgctcgagcgccgcggcctgagtcgcgtgcaccagcgcatcgtgtttttcatcgcccgctacccggggctgagcgtgaaagaactgctcacggcactgggggtgagcaagcaggcgctgaacattccactgcgccaattgatggagatgcacctggtcaacagcgttgcccctgagagcgacaagcgcaaacgcctgctggagctgacggaggacggcgcgcgctttgaacaatcgctgcggcgcgagcaggtaaagctgctgcaacgggtattcgccgaggccggcgaggcggcggtggatggctggctggcggtgaacaaggccctgggcgaaaaccgc

SEQ ID NO: 20 - DNA, 1164 bp, Pseudomonas chlororaphis
atggccttctccgaacgtgtttcgcgtcttaaaagctcactgatccgtgaaatccttgccgccgcgcagcgtccggaagtgatgtcgttcgctggaggcctgcccgccgaagcgatgctgccgaagaccgattggcaggcgatgccgttgtccatgggccaatacggcatgagcgagggcgagccacagctgcgcgaggccctggcggcacaagcccgggcgctgggcgtaccgtgcgaggcgagccaggtgctggtggtcagcggttcccagcagaccctcgatctggcggccaagctgtacatcgacaagggcaccgagatcatgctggaagcgccgacctacctggcagcgttgcagatcttccagctgttcggcgccgattgcctgaccgtgccgcttcaggccgatgggccggatctggcgcaattgcgcgcccgcctggagcagcatcgtcccgcgttcatctacctgatcccgaccttccagaatccttcggcggtgcgctacagcgaagccaagcgcgatgccgtggcggcgttgctcgacgagttcggggtaaccctgatcgaagacgagccttaccgcgagctgactttcgacggtggcagcgccatgcccatcgtcgggcgcctgcgcaaggccagctggatctacaccggcaccgtgtcgaagacgctgctgccagggctgcgggtcggttacctgatcgccagcccggacctgtttccccatctgctgcggttgaagcaatcggcggacctgcacaccaaccgtgtcggccaatggcaggcgctgcaatggataggtaccgagcagtatcagcagcacctgggcgagttgcgcgatttctaccgggttcgccgcgacggttttcaggccgccctgcaacgtcatttcggcgatctggccgattggcaggtgcctcagggcgggctgtttttctggttgaccttgaaacagccgctggacacccgcactttgctgaaagcggcgctggagcaggacgtggcattcatgccgggcgaacccttcttctccgagccggaccgcaatccaggtcacctgcggttgaatttcagtcatatcgatccggcgcgtctggacgaaggtctcaagcggctggccaccgtggtacgtcaagcacaggctgcacaggcagcc

SEQ ID NO: 21 - DNA, 5025 bp, Pseudomonas chlororaphis
atgagcattccttgcagcgaacaacctcgtgttctgcctcgtctttccctggcagagcaattaatgtcgcgtgctgataccttcccagatctgctggcttttgcttcgctggatcaatcgaagggcatatcgctgacaaatgcggacctttgcgagcgtgcagcggctattgcttatcgtctggcgcaaagaacctcacccggtgaccgggtattgctggcttatgacaatccccttgagtttattccggcattttttggttgttgtttctccggcacgattgccgtacccgttgctcctcgaaccaatggcgaaactgtagcggccattgttcaagattgtggcgggacacttgcgttaactgctcaaggacgtgagggacctccggggattgactggctgcaaacggacaacaatgatcggcgctctccttttatgcgcctggcggccgacaataatccagcgctgctccagtacacctcgggctccacacgaacaccgcgaggcgttgctgtaactcaggcgagcctacggacgacgatcgaagatctcgatcgcgcagctctgcacgatgcccagagtgtgatggtgagctggctgccgtactttcatgatatgggcttggtgtacggtattcttacgcccttgtattgcggtttcaccgcttacttgatgcctccggagagtttcattgcgcagccgttgtcatggttgcgagcgatggcatcggtgcgtggtactcatacggcagcgcccaattttgcctacgccttgtgtgcagatcgggcggctgatctggcacctggaacagacctttcttcaatgcgatttgcgctcaatggcgcagagccggttcggtgcgacagcgtgcgccgattcgtaacagcttttgctccctttggaatgcctgcttccgtggtcatacctgggtatgggttggcggaggcgaccctgaaagtggcatcgggacgttgcggcgaaggcacacgcagtcgctgtttcgagcccgccgcgctggccgctggacgggttgttccctgtcaccagggcattgagctggcgtcatgcggtaccagctcggtaggaacaagcattgtgattgtcgatcccgccacgcttgttccttgcaaacctgatgtggttggcgaaatttgggttgctgggcaaagtgttgcagatggctattggtcccgtgagagcgaaacacgggaaatattccaagcttgcctggctaccggaggagggccatggcttcgtacgggcgatcttggttttcttcagcaagacgagctctttgtcgtggggcgactgaaggatctgatcattgtcggcggccgtaatatctactgccacgatcttgaggattcggtctcggagtgccaccccgatattcgtaaaggccgcgtatttgcagtagccatagaaggggaggacggtgaagcggttctcatcggtgcagaggtgcgtagcagctgtaaagagggtgatacacgagacatcctctcgcgtattcgcacggagctgaaggtcaggcatgacataggcgcgctgcgtatcgttctgcttcggcgggggagtatcctgcgcacatcaagtggtaaaacccgtcgtgctgcaacacgtgatgccctgtttcgcggtgagttgcaggtcgttgctgactcccatcgtcaatccgtcgaagctgacgacgatatccttctagagattgctcgcttcgtgccgggcgctgtgggcgagcgcaccagcaggctgattgatgctgggctcgactcgctttcagctgctcggctagccgcggcgatttactcgcgttacggtgtaaggctcaagttcgagacgttgtatacggcatcggccgatagtctgtgcagggacattgccaatgcgcaaagtgctgcagtcgcagagcctttggcttcgcacgctatagattgcgcgcagccgtttgagttgtccgaaatgcagcaagcctattggatcggccaacagagtggtgttcccctcggcagtgttcaaccacacattcgtgttgattttgaagttgatcactcccaggtctcctctctgagcctgaggttggctgcgctggtgacagcccatccggctttgcggatgtccgtgcaagaggatggctgtgcggtcatcgatccgcgcgggtacgcccccgtcattgctcatcgagacttgcggggtctcggacagcaagccataagcgccggattgagcgcggcgcgcgaggagctcgcccaggacaatcgtcatcctctgagcgtctgtttcacgcgccttacggatgccaagacggtgttgcatttgcgtctggggttgcttgctggcgacctgcggagcttgttgctccttgttcgggagttggttgacggtccttccttggtatcgggtttcaggagggtggggacggctacctcctgcgtgccgtttgaatgtcgcgaagcctggctgaagaaggtggagtcaatcgcgcctgcgcctgatttaccgcaggcgatggctgccacggatattgatgcccctcgctttgtaatgtgccgacaggagctgtcggaagagctgacaacagccttggcattgaatgcacaggcgcttggggtcacgctctcgtcaatctgtatggctgcctttgttgacgtcttgcgtttatggtctgcatcgccagctctcaccatcaatgtgacttgcagtacacgatcaggacaggccgagcaggccattggcgacttcacgagcagtaccctgttgtctttgcgcgaaccccatgactccttcgccgactttgcccaggcgatccagcaacagatatggcgtgacctggacgagccctggtccacaggtgtttcgatgctccgtgaactcagtcgccgcaatggtgcgccggttctgatgcctatagtcgtgaccagtcttctgtcgggcgatcaggctgacgacctttcggttcttgactcgatcgggcctatggtcgacgtctccaatccgaccccgcaagtatcgctgcacaacatcctggcgcgacgcgatggacgtttgctgatgatgtgggagtatgtggagcagttattccctgccgggttgatcgagacgatgtttgcatcgtttgtggaggtgctcacgacgatcgccaccaggccctctgcggtcgaatatccggtactcgccaagattccagccagtcagcaagcacggcacctgaaggcgaattcgacgagctgcgacaggtccccgcgtcgattggctacgccgtttataacccacgcaactgaaagcccggacgcgatcgcggtagtcttcggtgatctactcaccacctacggtgacttgcggcaagatgccgaggacattgcggccaggttgcaacgcaaaggcgtcaggcgcggggatgtgattgcagccattgtcgaacctggtccaagggctgtggcagcattgattgggatcggcatcgctggagcggtctatctccccattgagccgtcctggccgctgacgagaattgaagagctcctgtacgaatccaaggccgggtatgcggtgctgacacacagcatgaacctgtcgataccgacgctgcagcttgatcagcaaccgggtcggctccggcctgaaccggtggatggggactcgagcgatgtcgcgtatgtgattttcacctcgggctcgacggggcgtcccaaaggtgtggttatcacccatgaggctgcggcgaacaccatagatgatatcaacgagcgcttctcggtcggcccgagggatcgagcactgtgcgtctcatcactggcgtttgacctttccgtctacgatattttcggattgctcgcggtaggcggtgccgtagtgtttcccgagcgatcccgcgatccggacgcaattgcgcaagcattgacgactgctggagtaacgatttggaactcggtacctgcagtccttgagctcttgcttgatgtcgctgcgcctcattcgtccagtttgcgactcgtcttgctcagtggcgattggattgcaccagctcttacggcacgtatccgtcaggtgtttacgggagcccagcccatcagccttggtggcgcaacagaggtctcaatctggtcagtcattcaccccatcgttcctagcgacgcggtactgctctcaattccatacgggacaccgctctcaaatcaacaatgttttgtgcgtgcccctgacggacgtgagcgccctgacggcgtggccggggaattgctactgggtggaagaggcttggccctggcttattgcggtaacgatgcagaaaccaaccggcgctttttcaccgataaggatggcaatcgcctctatcggactggtgatctcgcacgatggatgtcgactggcgaacttgaactgcttgggcgtatggacaatcaagtcaaggttcagggttatcgcattgaactgggtgagattgaagctgtcgcgatgaaggcaggtggtatttctcgggctgtggcctcggtcgttcgacgcagcggggcgacggtaatccagctccatgtgcttgcgtcgcaggaagtgcccggcgaggtagtgacctcagtgcgtgctgctcttgctctccatctaccaacctatatgcaaccgcaccatgtgggggtactcgacgttctgcccttgaccgcgaacggtaaggtggaccgctcacggctgcccgcgccacctgagccgaagccggtacggccggtgcgtggcgatgttttgctcgaaacgatgatgatgcaggcctatgtcgaagtggtgggtattggcattgaccctcaacagcgattcttcgatgcgggggcgacttcactgcacattgtgcgtttgcgcgcactgctggagtctcgtgggatagcggttccgtcgctggctgatttcttctcgcttgcgactattcgatcagttgtcacttcctccttagcgacgagtaccggtgccaactccaatcagaatgatattgcttacatacgcgcttacaagcaacgcgtgcgggcgcgcaggggagagttg

SEQ ID NO: 22 - DNA, 4683 bp, Pseudomonas chlororaphis
atggacaaggatatacctgttgacgccgtagcaatcattggcgctggctgccgggttcctggggcaaccacgttggaacagttctggtcagttatagccggcggtcaggtgacgattgagcgcttcaccgcagacgcggcacgacgcgaaggtgtgcccgaggcggtattgtcccaacccggttttatcggggcgggaggcacgattgaaaacattgatatgttcgatgccgcgttgtttgggattgccccttctcaagcagcatttatggaccctcaacaacgggtttttcttgaatgcgtccatgacgcactagagcatgctgggcacggtgcggctcgaggcccacgcatcggaatctgggcaggttctgcgagccttgattatttgaccgaccatgtcttgggccaactggatcgctcagcaccgaaccgctacctgcaacaatgggtaggcgttgacaaggattacctggctgcacaagtggcttaccgcatggattttggcggcccggcaatcacggtacagaccgcctgttccacttcactggttgctgtcgtactcgccgtccagggattgttgagttaccagtgcgacattgccgtggcgggaggtgccagcattgggttaccacaacggcaggggtatgtgcatgaggacggcagtattcttgccgcagatggcgcatgtcgcccctttactacacaaagtagcggcaccgtgtttggtaacggtgccggtgcagtgatcttgcggcggctggaagatgcgcttgacgacggggattctattctggctgtgattcgcggtgcagccatcaataatgacggggctgccaaagtaggttttaccgcgcctggaggccgggggcagggcgatgtaatccggacagctcttgcgctcggtgaagttgacggtgcctcgattgagtatgttgagactcatggtacagggactgccattggggatgcggtggagctttcggcgttgacgagtgcattaggggaccgacagcttggtggtccgcgttgtgctattggctcggtcaaggcgaatgttggacatatgaatgcagcagcaggcgtgtgtggtttgatcaaagtcgcactcgccgttcagcatgcccagattcctccgaccgtgggggccgcgcatgcgatcgacgagttacgtggaggatccccctattacctgccaactgatctgactccctggagtaccccgggtcggcgggcgggagtcagttcgttcggtattggcggtaccaatgcccacgtgatcctggaagcatcacctcgtcgtctggcgcaggtacggagcactgtaccgctgctgctggtttcggcacgtgaggacgctctacgcgagttgtgcgcaaactatgcggcgttcctggaggcggacccagatctctctatcgaagatgtgtgttttacggcagccatcggcaggctaactagggagcgacgtgtagcttttcgctctgagcagcgtggtcaactgatcagctcgctgaaggcgtttgccgacggtaaacaagatgagaatgcattttttaacgaagagcaggagcgtcggcctgaggtcacattcgcctttggtgacacagataatctgggtgcggttatcgacggcgttttagtctggcagacgcgcggtgttgtgccctcgattgtttgcggtaccggagccggcctatttgccgcggctttcgcggctggagccttgagcgctgatgatgcgcgcaactgtaatgcgcaaaatgttgtggcaccgtcactgctttggatcagtgcattctcgggcatggcaattgatagcgtggaggccgtgcgtaaggagcttgcacaactggcgcatagtcggggggacggtgcttcggctgtggcggcagcgggtgcgacgttggtgctcgagtttggcgacaacgcgctaggtgctgacgtagccggtgtcgcctcatttgcccaggagtcgctcaatgcgattgcaggactctggactggcggtatagatctggacttgacgaaaatctacagcggcgcaaatcgtgtgtcgcttccaacctatccgttccagcgcaagcgtttctggatcgaccctgcgccacgctacgccgatagcggcacttcaacttttcttgggcggcgcacagaggcgccgatgctgcgttccagcttttttgatgcccaatggagcgtggcgaccctgccatttctctgtgatcacatgatttacggcaaggtcattgtctccggtgcggcgctggcggtgatgatcgctgaaggggtgcgcgaggtgagtaaagcgcacgaattcgctctatacgatctacgttttcctgctgctctggtgattccgcaggggatggggcgtcgggtgcaactgcaacttgtacgtgatgatgacggttttgacgcgacagtattgactcaagaaccatttgaaatccatgccacggccagggtcgaaacgaccacaactgtcagtgtcgtgccatcgcagacggtacagggagaagaaaccccaaccgtcttgctggactcgtggttacgcgaccacagcgtggtgatgggctcttcgttcagtcggctatcggacattgttataggtcataacgatgccgtctgttcgatgcggaccgatgctggcgacgacgggtggctgctccatccggggatcctcgattcggccctgcaactgctggcggttgccgcccggccggaggggaataaggcgtttgttcccacccgtattgctcggttgaccatacgcgcccatgccgcatcgcagctccgttgttatgccgcagccgatcgtggcctcgctacgctgtttgacgaccacggcgttttggccgagatggtgggcctggaatcacgtgaggtcagtcggaacgaactgctgcgtatcgagccgctgcgcgatggctactccatcgaatggcggagccagtcgctcgaccgcccgttcgaattaccacagaccgtcgtcgttcttcgggatgcgggtagggttgccgaggagctggcggagatcctgctggctgagggtaagcgtccccttgtggtcgacagcccctccgatatctcgttcgagacaaccgactttattatcgattgtcgtggggcagatgcacgagcgacgggacccgatctgagtctgtataagggcgctttggacctgctcggcagagtcgcgagaaatgaccgcccgtgctgtgtagcaatcgtcctgccagtgaatgtacccagtggggcgccgctccaggcgcttgctcgggtggcggctatggaaaccccttatcttcggacattggcggtacgcgccaacgatgcgcgaaccattcgtcatggtctcgacttttttgatcgagaaacagaagtcatggtcgatggggagggcgtttcggcgccgcgttttcataggtttgatcttccacggcgcactgaagccagtttttcgggtgatgaaacgtggctcattaccggtggccttggtgaactggggttgcgtgttgcgagctggctcagcgcgctcggggttcggtcgctggtgctcactggccgtcacccacctgatgctgatgctcaggaaacactggctgcatttgagcatgaaggtatcgacgttcaagtgattcaggctgacttggcaaacgacgcagacattgaggcgctgttgcacaagatagatacgacgatgccggctttgcgcggaatttgtcatttggcaggcgtggtcgaggaccggctcatgggcgatgtcacacccgcatcgctgaaagcgacctttgccggtaaagctcagggggcatggttgctgcacgagcggacactgcgctatccactcaaacacttcattctattctcatctgccgctgcggcgtttggtgcaccagggcaggcgacttacgcgatggctaacgcctacctggatgagcttgcggtctatcgtcggtcacaggggatgccggcgctgtcgatcgcatggggcccatggcaagacattggtatggctgctcgtactgctgtcaccgcgaaacgccgattgagccagttggggatcggccagatagaggaggagtgcggtcgtgcgacgttcgagaacatcctattcgccgatctgccagcgcatgccgtcctgcttgcggtagattggcaacgtctggtcggacagtggcctccccaggttccattcagtcgctttgacgacattgtcagcgacattcccggctctgcgagaacgtcctcggtcaatgagctgctcccactgtctgccgatgaacgacggcatcggctgttccagctcatcgccgaggatgtgtcggccgtcacggggacagacctggcgacgctcgatcccgaacgttcgttgtttgagtacgatctcgactcgttgctcattacggacctgcgtttaaagctcgaaaggcgattcggacgtccggttgcagcgactgttattttctctaatcccacggtagctgcgctggctgaccatatggcgcagacggtctttggcgaggcggccattgacgcactgcgtagtgcagccgatcaggctcatctgcccgtgtctgcgtccgctttgcctgagacttcaatacctgaacatctctcacaggaagatgtggtcgaaatgctttcggcgaagctcgaagagctgcgcggagggagcatg

SEQ ID NO: 23 - DNA, 3528 bp, Pseudomonas chlororaphis
atgagtacgaacaatcccactaggctgatgcacgatgcgctgatagagattgaacggctccagcgaaaactgggtggactggagcaacagttgaacgaacccgttgcggtgctcggcatggggtgtcgattttccggtgcagactcgccagaggaattgtggcaactgctacttgccggtacggacggcgttcgagcggtcccggctgaccggtgggatagcgagcgctacttcgacgccgatccggattcggcaggccatatctattgccgcacgggcagttttctagacgatatcgcgtcctttgatcctgggtttttcggtatttcggcgcgagaggcgacgatgcttgatccgcaacagcgaatcctgctggaagttgtatgggaagcggtggagcgatccggtattcctgcctcggcactgaagggcagcgccaccggcgtatttgtcggtgttatgcatcaagattatgcccaccgaattcgcaacgccgctgatgtggacttgtacagcgcttcgggtaacgcagccagcgtgctggccggacgtatatcccatgtgcttgggctgcacgggccgtcgatcacccttgacacagcctgttcatcttcactggttgctgttcatctcgcttgcgctgcattacgcgccggcgaatgcgacatcgctattgtcggtggtgtgaatgtcgtcctttcgccagtttccacagcggcagagtgtcgtgctcatatgttatcggccagtggccggtgccgccccttcgacgactccgcagatggcttcgtccgtggcgaaggatgtggtgtcgttgtgctgcaacggctgagtgatgcgacagcggccggtcgctcgatcgacgccttgatcgcggggtctgccgtcaaccatgacggtcggagcgccgggttgacggtaccgaatgaacacgcccagcgtgaactgatacgagcggcattgcgggccgccaacatcgacgctcaacaggtgcaatatgttgaagcccatgggacgggtacatcactgggcgatccgatcgaagctgcggccctggcatcggtttttgccaaccgtgcgaaaggttcgcctgtgctacttggttcgataaaaagcaatttggggcatctggagggggccgcggggattgctggattgatcaaagctattctttgcgtgcgtcacggcgtagtgcctgcgacgcttcacgtcctgcagcccaatcgtggtgttgactggcgctcagtgccgcttcggcttgcccggcagaatgagcagatgagtggagccctgcgcgtggcaggtgtcagctcctttggtttcagtgggaccaatgcccatgcgctcgtcgtggcggcaccggtctcccaagctgtacggggggaggttcgctttccacagttattgacagtttcggctaaatcagcggcatcgcttctcatgaatgcggttcgttttgccgagcacctctctgggatcagcgaaaccgaactcgaagatgtctgcttctcgtcccgcgtggcgcggacacatttttcccaccgcctggcagtcgttgcatcgagtgcgcaggagatggccaatgagctgcgccgatttgccctgggagaacagacgacagtggtgtccggtctgacccgtgcaatgtcacctgcaagggatgtcgctggggaagcattgcccgaaacgctggaggccattgctcaaggttacgttcttggcgcgccagttgatttgaccagacttgcgcctgagcgatgccgcatagtgtcattgccgacctatgcattcgaccggcaaaaatattggctggacgagcagtccggagcaacgcaagcaccgccgctctatcggatagcctggaagccgataccgttggttgcatctgcgctgcgttcaggcagacggatcattgctggaaatgatccgcagctgtgcggtgaaatcgccgcagcactggaagcagcgggcgagcaatgcaccgtagtgggtgcggaggtcgagacaatcctgggggcaggaaatgccaacctgggtgtgatgcttgtagtcgcgggcagcctggcaaccaccgaaccgctggaggcaatcacacaatacggtgcccttatcatcgagttggctcaagcactcgcgctgaacccatccttgggccccgtggtggtggtcacacgaggggcgacctttaccgggccggcggaggaagttgaccctgtcgtcgcggccatcaacgcagcggtgcgtgttgcacgccgtgagcagggggcgctttggggcaggtcggttgacatcgatggatcgcaacagtcacttgcaacgcttgcggccatgctgggtacagttgaagacggcgaagaggaggtcgctattcgcgcggctgtcatcctcgtacctcgactgcgccgtaccgggacctgtgaggtgatgcctgacattgcggctgatggtgtgtatgtcatcaccggtggtacaggcgccctcggcctggcttccgcgtgttggctggcgagccgtggggcgcgccatcttttgttaatcagccgtcggggcgaacaggaacaagacgtgcgcgcgagctgcgatcaactgcgcagcgacggtgttgatgtgcgtgtggcctgtgccgatgtagcggacgaggtatcactgcgtagtgcgttggcactggcagaccgccccgttcgtggcgttatccattgtgccggtgtgattgacgactcctccctggtcaccatgacgtcggcaacattcgccggggtgttgcgcgccaaggtgggaggggccgacctgcttgaccggctgacagttaaccagcccgtcgatctgtttcttcttttctcgtcgatctcggtcgcacttgggcgccatggccaggcggcctacgcggcggcaaatgcctacctcgacgcactttcgcaacaacgttgcctgcatggacgtcccgccttgtcagtcggctggggactgtgggcggcaggcatggggactactgaccccaaagtactggagcgaatgcgtgcgagcggcctgcaggcattgaccgaaaccgaggcttttggagcgctggaaaaagcattcaatgtcgatgcacacctcatcatcgcggcgattgatacccagcggatagcttcacagccgaaccttccgcgactgcttgaggggatggttggcggtcaccctccgatgcgaagacccgtatttgatttcgagcaacttcgtgggcacagcgctgatgctcgccgagcattgatcgccgagtacctagggggggagctgcagtttatcttgtccagtgatgtcgagttgtcgcacgacatgtcgctgattgaactggggatggactcccttaccggctcggaactgcgtaacgccatagaacgatcgactggcgtttatgtacctatgcagcacttcatcgatgggtcgccgttgaacaccgtggttgaagtgattgtgggccaacttgagcgccggctcgtgactacccagtcggtgagcccaggtactagcacagagaaaattacccta

SEQ ID NO: 24 - DNA, 13110 bp, Pseudomonas chlororaphis
atgcagttcagcgaattgatggcaattatttccacccagccgatccgtctccaacaggaagaaggcgacctggtcgtgctgggtgacgatgaggggctggacgacgcgctgtgggacagcctggtcaagcacaagtcgcggctgctggacctggtggcccgccatgacggcgactggctgagcccggcctaccgcatcaccccggacatgctgccgctggtcaagcttgaccagccggccatcgaacgcatagtcgccagcgtgccgggcggcgcggccaacgtgcaggacatctacccgctggcacccctgcaggagggcatgctctaccaccacctgtcggcccggcagggcgacccctacgtgctgcacgcgcagttcgccttcgccagccgcgagcgcctgaacgcctttgccgaggccctgcaatgggtgatcgagcgccatgacatcctgcgcaccgcgatgttctgggagcgtctggacgagccggtgcaggtggtttggcgccaggcccggctggactgcgaagaactgagcttgaagaccgccgacggcgacgtgctggagcaattgcgggcgcgcttcgatgcccgccactatcgcctcgacctgcgccaggcaccgctgttgcgcctggtcttcgccgaagacccacgccagcagcgggtggtgggcatgctgctgtttcatcacacggtcatggaccataccgcgctggacctggtgcgcgaggaaatccaggcgcacctgctcggccaatgcgcacaggtggcgccggcggtgccgtttcgcgattacctggcgcaggcgcggctgggggccgatgagcaggcgcacgaggcgttcttccgccagatgctcggcgatatcgacgagccgaccctgccgttcggcctgcgggatgtgcagggcgacggccgcggcatcgaggagctgcggatcggcctcgacgacgggttgagcctgcgtttgcgcggccagtcccggcagttgggggtgagcgccgcgagcctgatgcacctggcgctggccctggtcctgggcaaggcctcggggcgccgtgcggtggtgttcggcaccgtgctgctgggacggatggacgccggcgaaggggccgagcgggccctgggcatgtttatcaataccttgccgctgcgggtggatgtcgacgggcaaagcgtgcgcgccgcggtgcaggccacccaccagcgcctgaccgcgctgctcgggcatgaacaggcctcgctggccctggcccagcgttgcagcgcggtgagcgcgccgacgccgctgttcagcgccatgctcaactaccggcacagcgccgccggcgacgccgcggcggtgatcgacatcgccgagggcatccaggtgctgggcgccgaggagcgcaccaactacccgctgacggtcaacgtcgacgacctcggtgaaggtttccgcctgaccctgatggtcgccgccgagatcggcgccgcgcgcctgggcggttacctgcaaacggccctggaaagcctggtcgcggccctggaacacagcccggacgcgccgctgcaaaacctgaacattctgccggcggccgaacgccagcagctgctgttcggcctgaacccggtccggcaattcgccgacagtgccttgatccaccagcaggtggaggcccaggccgcggcacagcccgacgccacggcgctgatccatgaggggcggcaactgagctacggcgagctgaaccgccgcgccaaccagctggcgcaccgcctgctggccctgggcgtgcgcccggacgaccgggtggcgatctgtgtcgagcgcggcctggagatgatcgtcggcctgctgggcatcctcaaggcgggcgccggttatgtgcccatcgacccggcctatccccaggagcggatcgcctacaccctgcgcgacagcgaaccgctggcgctgctggcccaggctggcacccggcagctgctgggcgaactggcggtgccgctgctcgacctcgacgacctggagctgaatcggcagccctcggacaacccccaggtaccggggctgagcagcgccaacctggcctatgtgatctacacctcgggctccaccggcctgcccaagggcgtgatgatcgagcaccgtaacgtggcgcggctgttctcggcgacccaggaggggttcgccttcaaccgccaggacgtgtgggcgctgttccattcctttgccttcgacttctcggtctgggaaatctggggcgcgctgatccacggcggccggttgctggtggtgccgcagctggtcagccgctcgccggacgattgttatgcactgctgtgcgaagcctcggtaagcattctcaaccagaccccgagcgccttccgccagttgatcgcggcccaggaacgcagcccgctcaagcattccctgcgccaggtgatcttcggtggcgaagccctggatccgggcattctcaagccctggtatggccgggtggaaaacgccggcacgcagttggtgaacatgtacggcatcaccgaaaccacggtgcacgtgacttaccgcgccctgcaggcggcggatgcccagcgcctgggggccagcccgattggcggggcgattcccgacctgcaactgtacgtgctggatgagcggcgcgagccggcgccggtgggggtggtgggcgagctgtatgtcggtggcgccggggtggcgcggggttacctgaaccgcgaggcgttgaccgccgagcgtttcattgacgatccgttccgcgcggacagcgggcagcgcctgtacaagaccggcgacctggcgcgctggaacggccagggcgagctggagtacctggggcgtaatgacgatcaggtgaagatccgcgggttccgtatcgagctgggggaaatcgaggcgcggctggcggcctgcgccggcgtgcgcgaggcggtggtgatcgcccgcgaggacgagcccggcgaccagcgcctggtggcctacctggtcggcgccgaaggggtcgaactggatgccgcggcactgcgtgaccagttgctgctgtccctggccgagtacatgctgcccagcgccttcgtgcagctcgacgccttgccgctgaccaccaacggcaagctcgaccgcaaggccctgccggcgccggacagcacggccctggcccgtcgaggcttcgaggcgccgcagggtgaggtggaacagcgcatcgcggcgatctggcaggagctgctcaaagtcgagcgggtcggccgtcatgacaacttcttcgagctgggcgggcattcgctgctggcggtgaaactgatcgagcgcatgcgccagctggaactgggcgccgatgtgcgggtgctgttcggccagccgaccctggcggcgctggccgccgcggtgggcggtggccgggagatccaggtgccggccaaccgcatcggcgccgactgcagccgcatcaccccggacctgctgcccctggcggacctcgaccaggccgccatcgaccagctcgtcgccggcatccccggcggcgttggcaatgtgcaggacatctacggcctggcgccgttgcaggcgggcatcctctatcaccatctggcgagcgaggaaggcgacccctatgtgctgcaggtgcaatgcgccttcagcggccgaccccaggtcgaggccttcgtcggcgcgctggacagcgtgatcgagcgccatgacatcctgcgcagcagcgtgcactggcaaggcctcgccgaaccggtgcaagtggtctggcgccaggcgccgctggtggtcgaacagctggaacccgaggcgggcggcgatgtattgcaacaattgcagcagcgcttcgacccgcggcattaccggctggacctgaaccgcgccgcgctgatgcgctttgcctacgcccgggacgcgcacaaccagcgctggctgggcatcctgctgctgcaccatatcctcttggaccacaccgcgctggcgaccctggtggcggaaatgagcgccagcctgagcgggcttgcccgctccctggatgcagccggccacgcccagcccctgggcgaggccgtgcagtaccgcaactatgtggcccaggcccggctcggggtcagtgaggaggaacacgaagactttttccgcgagatgctcggcgatatcgacgagccgaccctggctttcggcctgggggacgtcaaccgtgacggcagtggcgtggaagagacgcgcctgcccctggacgcagctttggctcggcgcctgcgcgaacaagcgcgccagctcggggtcagcgccgccagcctggtgcacctggcctgggcccaggtgctgggccaggtctcgggccgcgacgatgtggtgttcggcaccgtgctgctcgggcggatgcagggcggcgagggcgccgaccgcgccctgggcatgtttatcaataccttgccgctgcgggtcagcctcggcgccgtgggcgtgcgcgacgcggtgcgcgccacccacggccggctctcgcaattgctcgggcatgaacacgcgtccttgtccctggcccagcgctgcagcggcgtgccggcttcactgccgctgttcagcagcttgctcaactaccgccacagcgccgccgaggaagtggccgcagtggacggcgcggcctgggacggcatccagattctcagctcgcaagagcgcagcaactacccgctggtgctgaatgtcgacgaccgtggcgaagccttcgagctggtggtgcagaccctggccgaggtcggtggccagcgagtggccggttatatgcagactgccttgcagggtctggtggaggccctggagcaggcgccggcccggccgttgcgcgagctgagcatcctgccggcggaagaacgccagcgcctgctggtgagcttcaacgctacccagcgcgactatccgcgggaaaagaccctgcacgccttgttcgaggcccaggcacagcagcacccgcaggccacggcagcggtgcagggcgggcaaagcctgagctacgacgccttgaaccgccgcgccaaccagctggcgcaccacctgatcggccttggagtcaaaccgggggacagcgtggcgatcctcctggagcgttccctggacctgctggccagccagttggcggtgagcaagtgcacagcggtctatgtgccgctggacatccacgcgccggccgagcgccaggccttcatgctcgaagacagcgccgcgcgggtgctgctcagcgacagccgccaggcaacttctcacagcgtcgcccgggtcgatctggatcgcctgaccctcgacggcgtgccggcgcacaacccggagctggcgcagtcctccgaggcgctggcctacatcatgtacacctccggttccacgggtacgcccaagggcgtgctggtgccgcaccgggcgatcacccggctggtgatcaacaacggttatgccgacttcaaccgcgacgaccgggtggccttcgccgccaacccggcgttcgacgccagcaccctggaggtctgggcgcccttgctcaacggcggctgcgtggtggtggtcgagcaggacgtgctgctgtcccgcgaggctttcggccagctgttgcaggcacagcaggtcagcgtgctgtggctgaccgccgggctgttccaccagtacgccgatggcctgatgccggcgttcagccgcttgcgttacctgatcgtcggcggcgacgtgctcgactcggcggtaatcggccgggtcctgcaacagggcgcgccgcggcacctgctcaacggctatggcccgaccgaggccacgaccttttccaccaccttcgaaatcaccgaggtgggcgagggcggcattcccatcggccggccgatcggcaacagccgggcctatgtgctcgatgcccggcagcgcccgctgccgatcggcgcggtaggcgagctgtatatcggcggcgccggggtggccaaggggtacctgaaccagccagagctgaccgcccaggcgtttattgcagatcctttcagcgaccaaccccaggccctgctgtaccgcaccggcgacctggcctcctggcgcgccgacggcaccttgctgtaccagggccgcaacgaccagcaggtgaagctgcgcgggttccgtatcgagctgggcgaaatcgagacccggctggcggcctgcccgggcgtccaggacgcggtgttgctggcccgcgaggacgagcccggcgacaagcgcctggtggcttacttcaccgtcgtggccgatgagtcggcgccgccgctcgacagtttgcgcgcccagctgcaaggccagctgcccgattacatggtgccgtcggcctatgtccggctcgaccgcctgccgctgaccgccaacggcaagctggaccgcaaggccttgccggtaccggatcaggcggccttgctcagccgtggtttcgaggcgccgcagggggaggtggaaatcgccctggcgcggatctggagcgagctgctcaaggtcgagcaggtcggccgccacgatcatttcttcgagctgggcgggcattcgctgctggcggtgagcctgatcgaacgcatgcgccagatcggcctgagcgccgatgtgcgcgccctgttcagccagccgagcctggcggccctggccgcggcggtgggcagcggccgggaaatccaggtgccggccaaccgcattggcgcgggctgccagcgcatcaccccggagctgttgccgttggtggagctggagcaggcggacatcgatcggatagtcgcccaggtgcccggcggcgcggccaatgtgcaggatatctaccccctggcgccattgcaggaaggcattctctatcaccacctgagtgccgagcagggcgacccctacctcctgcaatcgcgcatggccttcgacagcctggaacgtttgcaggcctttgccggcgccttgcagcaggtgatcgaacgccacgacatcctgcgcacggctgtgctctgggaaggcctgaagcagccggtgcaggtggtgtggcgcaaggccgagctggtgttgcaacaggtgccgctggatgcggccggcggcgaggtgctggagcagttgcacgcctgcttcgacgcccgccattaccgcctcgacctgacccaggcaccgctgctgcgcatggtctatgccgaggacctggcccagcagcgggtggtggccatcctgctgttccatcacctggccctggaccacacggcgatggccgtggtcggcgaggagatgcgcgctttcatgttcggcgagggcgaccgcctgggcatgcctgtgccttatcgcaactacgtggcccaggcgtgcctgggggcggcggagcaggagcacgaagccttcttccgcgacatgctcggcgatatcgacgagccgaccctgccgttcggtttgcaggatgtgcagggcgacggccgtgatatcgaagaggccgagctggccctggacaccgccctgagcctgcgcctgcggaccctggcccggcgcctgggagtgagcgcggcgagcctgatgcacctggcctgggcccaggtgctgggccaggtgtcgaaccgtcgggatgtggtgttcggcaccgtgctgatgggccgcatgcaaggcggcgagggcgccgaccgcgccctggggatgtttatcaataccttgccgctgcgggtcgatcgcggcctgggggtacaggccgcggtcaaggccacccacgcccggctgaccgcgctgctggggcacgaacatgcgtccctggccctggcccagcggtgcagtggcgtggccgccggcgcgccgctgttcagcgccttgctcaactatcgccacagcgtgccgcaggagatggcccgatccggccagggcatctggcagggcgtcgaactgctgggcggcgaagagcgcagcaactacccgttgaccttgagcgtcgacgacctgggcgagggcttcggcctgaatgtgctgacgctgtcgagcatcggtgcgcagcgcatcggccagtacatgcagcaggcgctggaacagttggcccaggccctggagcaggaccccgagctggcgctgcaacgcctgccgatcctgccgcaggcggagtggcaacgcctgctgtcgagcttcaatgccagcgccgcgaactacccgcgcgggcagaccgtccacggcctgttcgaaacccgcgccgcgcgtaccccggacgccttcgcgctgctgcagggcgagcagcgcctgacctatcgccagctcaaccagcacgccaaccagctggcctggcacctgctggcccagggcgtgcagccggatgatcgggtagcgatctgtgtgcgccgcggcccgcagatgctgatcggcctgctggcgattctcaaggccggggccggttatgtgccgatcgatccggcctacccggcggagcgcatcgcctacctgttgcgggacagcgcgccggtggcggtgctggcgcaacagcagactcgcgcgctgctgggggacagcctgccagtgatcgatctggcggccaccgactggcaataccgcccggtgaccaatcccggcccggcgctgaccgcggcgcacctggcctatgtgatctacacctcgggctccaccggcttgcccaagggggtgatggtcgaacaccagaccctggaaaacctggtgcactggcattgcgcggccttcgacctgaagccgggcagccatacctccagcgttgccggtttcggtttcgacgccatggcctgggaggtctggccggcgctgtgcggcggcgcgaccctgcacctgccgccggccgaggtcggcaacgaacacatcgacgaactgctgcactggtggcgcgagcagccgctggacgtcagcttcctgccgaccccggtggccgagtacgccttcagccaggacctggaccatccgaccctgcgcacgctgctgatcggcggcgaccgcttgcgccatttcagtcgcaaccagcgcttccaggtgatcaacaactacggcccgaccgaggccacggtggtggccacctccggcaggatcgaggccgggcagccgctgcatatcggcaagcccatggccaacgcgcgcatctacctgctggacgagcagctgcaaccggtgccggtcggcgtggcgggcgagctctacgtgggcggcgccggggtggcccggggttacctgaaccgggcgcaactgaccgccgagcgtttcctcgacgacccgttcagcgccgattctgtcaacggcggcccacaggcgcgcatgtaccgcaccggcgacctggcgcgctggctggccgacggcagcatcgagtacctggggcgtaacgacgatcaggtcaaggtgcggggcatgcgcatcgagctgggggaaatcgaagccgccctggcccgcaacgaggcgctgcgcgagtgcgtggtgctggtgcgcgacgggcgcctggtggcctggttcagcgagcaccggccgctggatatcgaggagctgcgcacttatctgcaagggcgtttgcccgagtacatgctgccggcggcttatgtgcgcctggacagcctgccgctgaccgccaacggcaagctcgaccgcaaggcgctgccggagccggatcaggcggccttgctcagccgcgagtacgaggcgccccagggcgaagtcgaggtgaccctggccgggatctgggccgaggtgctcaaggtcgagcgggtcggccgccacgatcacttctttgagttgggcggccattcgctgctggcggtgagcctgatcgaacgcatgcgccagctgggcctgagcgccgacgtgcgcatcctgttcagccagccgaccctggcggcgctggccgcggcggtcggcagcggccgggaggtcgaggtgccggccaacctgattcccgccgactgccagcacatcaccccggacctgttgccgttggtggaactgcagcaggccgagatcgaccgtatcgtcgcccaggtccccggcggcgcggccaatgtgcaggacatctaccccctggcgccgttgcaggaaggcatcctgtatcaccacatcatggcggagcagggcgacccctacctgctgcaatcgcgcatggccttcgacagcctggagcgtttgcaggccttcgccggtgccttgcgccaggtgatcgagcgccacgacatcctgcgtactgctgtgctctgggaggggctgaaacagccggtgcaagtggtctggcgcgaggcgccgctggtgctgcgcgaggtggcctgcgacacggccgccggcgaggtgctggctcagttgctgcagcgtttcgatgcccggcgttaccgcctggagctgacccaggcgccactgatccagctgatgtacgccgccgacccggagcgccagcgcgtggtggcggtattgctgttccaccacctggccatggaccacagcgccctggaagtggtgcgccacgaactccaggccttcctgctggaccaggcgcagggcctgggaccagcggtgccgtttcgcaactatgtggcccaggcacgcctgggcaccggcgagcaggaacatgaagccttcttccgcgagatgctcggcgatatcgacgagccaaccctggccttcggcttgcaggatgtgcagggcgatgggcacgggatcgaggaacggcgactgcgcctgccggcgtccctcgaccagggcctgagaagccaggcgcggcgcctgggggtgagtgccgccagcctgttccacctggcctgggcccaggtgctggcggcggcctcgggcaagcgcaatgtggtgttcggcaccgtgctggtgggccggatgcagggtggtgctggcgccgaccgggcgctgggggtgtttatcaataccctgccgttgcgggtcgatatcgacgagcaggatgtgcgtgccggcgtgcgcgccacccatgcccggttgacggcgttgctggggcacgaacacgcgtccctggccctggcgcaacgttgcagtggcgtcgcggccggcgcgccgctgttcagcgccatgctcaactaccgccatagccttaccccgcgccaagagctgcaacacgcctggcaggggatcgaaaccctggccagcgacgagcgcaccaactatccgctgaccctcaatgtcgacgacctgggcgatggctaccacctcaccgcgctggttgccgccggagtgggggcgcaacgggtttgcgactttatgcagactgtgctgcaggggctggtggacgccctggaacagtcgccgcaaaccgccctgaaccgcctgccggtgatcaccgccgaggaacgccggcaactgctggtggcgttcaatgccaccgagctgccttacgaccttgagcagagcattcatgggctgttcgaggcccaggtcgagcgcacgcccgaggcgctggcggtcaaggccggcgagcagtcgctgagctatcgtgccctcaatgagcgggctaaccagctggcgcattacctgcgcgagcagggcgtgggcccggatgcgcgggtggcgatctgcgtcgaacgcgggctggagatggtggtgggcttgctggcgatcctcaaggccggcggcggttatgtgccgctggatccgtcgtacccgctggagcggatcgcctacatgctggaagacagcgcgccggtggtggtgctggctcagggagcgactcgcggcttgctcggtgaggtgccggtgatcgatctggatcagcctgtgtggctggatcagccgctcagtaatccgtttattgccgagctgactccgcggcatctggtctatgtgatctacacctccggttccaccggcaagcccaagggcgtgatcaacgagcaccgtgcggtggtcaaccgactgctgtggatgcaggaccaatatcgcctgtccgccgaggatgcggtgctgcagaaaaccccgttcagcttcgacgtgtcggtctgggaattcttctggccgttgatgactggcgcgaagttggtgatggcccgtcctgagggccataaagacccggcctacctgtgcgaagtgatccaggccgaacgcatcaccaccttgcactttgtgccgtcgatgctcgatgtattcctcgctcatggcgataccgcttgctgcactggactgctgcgcgtgctgtgcagcggcgaggcgctgccgggcagtctggtgcgacggttcaaggcgcaattgccgggcagtgaactgcacaacctctacggcccgaccgaggccgcagtggacgtgaccgcctggagctgcgcgggtcctgtggagcaggtcccggacaacacgcccatcggcaaacccatcgccaacacccgcctgtacctgctggacgaacagctgcaaccggtgccgctgggtgttgtcggcgagctgtatatcggcggggtacaggtggcgcgcggttatctgcatcgcccggaactgacggccgaatgtttcctaaaagacccgttcagcagcacagctcaagcccgcatgtaccgcaccggcgacctcggtcgctacttggcggacggcaccatcgaatacctggggcgcaacgacgatcaggtgaagatccgtggcctgcgcatcgagctgggggaaatccaggcgcgcctgacccagttcctggatgtgaaagaggcggtggtcctggcccgggaagatgtgccgggggacaagcgtctggtggcctattacaccactgagctttccagcgaacggctggagaccgaagcactgcgcagccacctgttggagcaactgccggagtacatggtgccggtgctgttcgtgctcctgccggccttgcccctgagccccaacggcaagctcgatcgcaaggccttgccagccccggacctggaatcactgcgggtacgggaatacgaggcaccgataggcgacaccgaaatcctcctggcgcagatctgggccgaattgctgaacgtggaacgggtagggcgccacgaccatttcttcgaactgggcgggcattcgctgctggctgtcagcctgattggtcgcttgcgtcaggaaggcatggaagccgatgtcagggcgctgttcgaacagccgaccctggcgggctatgccgcaattaccgaacgaatggagatcgtcctg

SEQ ID NO: 25 - DNA, 13110 bp, Pseudomonas chlororaphis; identical to SEQ ID NO: 24

SEQ ID NO: 26 - DNA, 1173 bp, Pseudomonas chlororaphis
atgatgaatgaccgagtcgcggcatttctagcggttgaggcggcgctggctgcgccggaggcggcactggcgagtggtgattttgctacggtcgagcagttgatgagtgacatccgtggggcaaaccgggcgagggggctttggcttccccagctctctcgagtcaatggcggctcggggctcgacctgctcgaactggtggaagtcggggaagtgcttggcaggtcgccactgggccactatgcggttaactatcaggcacctgatgccggtaatatcgacatccttctcgagtacgccacgtctgagcagaaaagacgctggcttgatcctttactgcagggcaaggtccgcagttgctttgcggcgactgagccggacagggccggctcgaatccttctgctctggcgaccaaggctgttttcaaggagggtgcatggcacctcactggccgcaagtggttcgcctcgggcgcagaccgtgcggcatttgcgatcgtgctcgccgttaccgatgagactgcgccgctgcacgcgcgaactagcacctttatcgtaccgactgatgcacccgggtatcggcatgttcgcaatattcgcgtgatgggcgatgaggggtgtggctgggccagccatggtgaaatcgagctggacgactgtcgagtggagacggacgcgttgttgggcgagcttggggctggattcgtcgtcctgcaggcccgccttgccacggggcggctacatcattgcgcgcgctggatcggtgtttgcgagcgcgcgttcgcaattatgtgtcgacgggccagccgccgcgaactcgcaccgggggagtttttgtcgtcgcgccagacggtgcagaactggattgctgaaagccgtgcttcgatcgacgcggcccggctccttgtcgctcaggccgcgtcgcgcttgcagaagcgccatgagcgagcccaagttgacatatcaatagcgaaattttttgtcgccggagtgacccagaacgtccttgatcacgccctgcagatccaaggtgcactaggtgtcagcggtgacacgatcgtaaacgtcctctggcgccatgagcgcgcaggacgcatttatgacgggcctgatgaagtacacaaggcgttggtcgcgcggcatgcgctggccgcgtttcgtggtgagcctcga

SEQ ID NO: 27 - DNA, 966 bp, Pseudomonas chlororaphis
atgagcctccaggtcgcgcacagaacgatgatcgccctgggtaaccccggcgcagccgctctggcgactcgcatcggagcaggtcgatccagtgagacatacttggtgcaggcgaacgatcgcgacctcatcacttatgttttgccgtctggcagtgggcgggaagcacaccgccgtttcgcggtgttggagcggattgctgaacactatcgtctagcgccaaagccgcttgctgtgatggacgtctccgatgaaggtctgtcattactggtgatggagcggctcccagggattttgccgacgacctgcgtttcgcttacgcctgacactgttcgtcgtctctgcattgggtttatttctgcgctggcgtcattgcatgccattgagattgctcctgttgataggcctccggagtatctgcgtcgcagcattggcgattgggagcggcgctggtgcgaagaagaggccgcaggtgctcacgatgacttcaatgcggtggtgcggtggttgacggataacctgccggaccaggtcgcttcagcttttgtgcacaatgattttaagctggacaacattctggtcgatcccggcgaccctgcacgggtggtcggggtcgttgactgggagttggccaccattggccatcctcttgccgatctagggatcgctttggcctattggattgaacgcggcgactcttcgttgctgcgtctcgatgcgccggggccaagttgtgctttgggggcaccgacccgtcaggaactggtagagctgtatgctgcggccagcggtcgcgaggtacccaatgcctcgtattggtatgtctacggattactgcggctggctgttatcacccagcaactggtgttgcgtcataaagacggtggcccacccgttccccgtggccagctcatcgtacgatcgctcttggttcatgcattgaacacttgtgggagcggacgacta

SEQ ID NO: 28 - DNA, 897 bp, Pseudomonas chlororaphis
atggactatcacgtgatcatcgtcggcggcagctacgccggtctttccgcggggctgcaactggcccgggcgcgccgccgggtgctggtgatcgatgcagccgaacggcgcaaccgctttgccgacacctcccacggctttctcgggcaggacggtcgctctcccgcggatattgccgacgaggctcgggaacagctgctggcctacccgacagtggagtggctggcggacaccgcgatcgacgccggccaggacgccgagggtttctggctgagcacccgcggtggccagcgccacagggcccagcggctgatcctggccaccggggtggtcgatgagctgccggaggtcgaaggcctggccgcacgctggggcaaaagcgtgttccactgcccgtactgccacggctatgagttggccggtgggcccatcggcgtgctggcgacttcggaactctcgatgcaccaggcgctgatgctgccggactgggggccgaccaccttgttcatcaatgacgcctttgtaccggacgccgagcaactggcgagccttgaacggcgtggcgtgcgggtggagcgcgagcctgtgcggcgcatcgccggcgacaaggccgaggtgatcctggccgatggccgggcgattgcggtcgagggtttgtttgtcgtgccacgtacccgcatggccagcccgctggccggggtgctgggctgtgagttcgaggaggggccgcttggcgcctttatcaagaccgacgcgacccgcgagaccagcgtgcccggggtattcgcctgtggcgacgctgcggcggcattcagctcggtggccatcgccgtgggcgacggggccaagaccggtgcgggtacgcatcgctcgctgatattcggcctggccccggtg

SEQ ID NO: 29 - DNA, 828 bp, Pseudomonas chlororaphis
atgcgtacccacagcgacaaaggggctcgcgttgcacaccccccgaagggctggcgcatacgcgagaacactgaggcatgccaaccgttgcgcggcgagtgggtcgagccgcaggacccggctcaacgtgacaggctccaccgtgtcgtcatgtacctgcatggtggtggttactgcttttgctctccgaagacccatcgtcggattgcgtacgcattggctagcggtggtgaggcgcgtaccttttcgttggcttaccggctagctccggagcatccattccccgccgcagtcgacgatgccctggccgcctaccggcagctacttgccgaaggtgtctgccctgcgcgcatggtcatttgtggtgactccgcgggtgggggcctggccctggcaatgctgttgtcattgcgtgattcggatgaaccgatgccagcaggtgcggtgctgttttcgccatggacagacctggctgcaacgggagcctcattggcgacgaacaaccagagcgacgtgatgctgacaggcgcagccgtagcaaggttttcccggcattacctgaacgatacgcctgcggaccatcccattgcttcgccactctatgcacagttttctggtttgccgcccttgttcattcaagccagtgacaccgaggtgctgctggatgacgcggtgcgggttgccgaaaaagcccgtctggctcaggttacggtgaatttcaaagtctggccccgtctcccgcatgcctggccgacgatgacccctttcttgccggaggcgaaggcggcagtcaaggaggcagttgaattcatccggagcgtgacggtg

SEQ ID NO: 30 - DNA, 762 bp, Pseudomonas chlororaphis
atgaccatcggaccgcttggctctaaccactgggtcgtacctggcacatcgcctggcaacgctagagtgagattgttctgcctgccttacgcagggggcagcgcagctatctttcgcgactggcctgcacgattggcatcggatatcgaggtgcttcccttgcacctgcctgggcgagggcagcgcatgcatgaagcattgctacatgacctgggtgagatcaccaatcaggtggcggaggccatcgcgccgttgcttgagaagccttatgtcctgttcggtcacagcatgggagcctgcctagcctttgaggttgcgcgccgcctacgtaccagtggcctgccggagccggcttgtttgatcgtgtctggccacggtgcaccgcatttgccagccagtcgctcgttactacacgggcttcccgatgacgagttcatcgatgaggtgatgcgtttgaacggcacaccacctgaaatactgaaacaccctgaagtggtcgagctgatcctgccaatcctgcgtgccgactttgaggcggtggaaacctacagtatgaccccacagccacctcttacctgtcggattgttgcgctgggaggtgacaacgatcccgatatggataacgacgcggtagcgtcgtggggcatccataccacgaacagtttttattatcagatgcttccaggcgatcactttttcctgcatggcagcgctgaacagatgtttgccttgatcaacaaggaactgcggtctgtgttgctc

SEQ ID NO: 31 - DNA, 840 bp, Pseudomonas chlororaphis
atgatctcggtgcccttgtcgatgtacagcttggccgccaggtcgagggtctgctgggaaccgctgaccaccagcacctggctcgcctcgcacggcacgcccagcgcccgggcctgcgccgccagggcctcacgcagctgtggttcgccctcgctcatgccgtattgccccatggacaccggcatcgcctgccaatcggtcttcggcagcatcgcttcggcgggcagccctccagcgaacgacatcacttccggacgctgcgcggcggcaaggatttcacggatcagtgagcttttaagacgcgaaacacgttcggagaaggccatgagggtcaccagtagcgaaggcggaggaaaatacgtcaaactgcttgaccgaaattacgccgactttcgcagatacgtcaatatgcttgaccttaaaaaccagaccacgcaacaagccgccatggaagccttcttctttggttaccaggcgttcaccgccaaggccgacgaaatgctcgagcgccgcggcctgagtcgcgtgcaccagcgcatcgtgtttttcatcgcccgctacccggggctgagcgtgaaagaactgctcacggcactgggggtgagcaagcaggcgctgaacattcccctgcgccaattgatggagatgcacctggtcaacagcgttgccccggaaagcgacaagcgcaaacgcctgctggagctgacggaggacggcgcgcgctttgaacaatcgctgcggcgcgagcaggtaaagctgctgcaacgggtattcgccgaggccggcgaggcggcggtggatggctggctggcggtgaacaaagccctgggcgaaaaccgc

SEQ ID NO: 32 - DNA, 1164 bp, Pseudomonas chlororaphis
atggccttctccgaacgtgtttcgcgtcttaaaagctcactgatccgtgaaatccttgccgccgcgcagcgtccggaagtgatgtcgttcgctggagggctgcccgccgaagcgatgctgccgaagaccgattggcaggcgatgccggtgtccatggggcaatacggcatgagcgagggcgaaccacagctgcgtgaggccctggcggcgcaggcccgggcgctgggcgtgccgtgcgaggcgagccaggtgctggtggtcagcggttcccagcagaccctcgacctggcggccaagctgtacatcgacaagggcaccgagatcatgctggaggcgccgacctacctggcggcgctgcagatcttccagctgttcggcgccgattgcctgaccgtgccgcttcaggccgatgggccggatctggcgcaattgcgcgcccgcctggagcagcatcgtcccgcgttcatctacctgatcccgaccttccagaatccttcggcggtgcgctacagcgaggccaagcgcgatgccgtggcggcgttgctcgacgagttcggggtgaccctgatcgaagacgagccttaccgcgagctgactttcgacggtggcagcgccatgcccatcgtcgggcgcctgcgcaaggccagctggatctacaccggcaccgtgtcgaagacgctgctgccagggctgcggatcggttacctgatcgccagcccggacctgtttccccatctgctgcggttgaagcaatcggcggacctgcacaccaaccgtgtcggccaatggcaggcgctgcaatggataggtactgagcagtatcagcagcacctgggcgagttgcgcgatttctaccgggttcgccgcgacggttttcaggccgccctgcaacgtcatttcggcgatctggccgattggcaggtgcctcagggcgggctgtttttctggttgagcttgaaacagccgctggacacccgcactttgctgaaagcggcgctggagcaggacgtggcattcatgccgggcgaacccttcttctccgagccggaccgcaatccaggtcacctgcggttgaatttcagtcatatcgatccggcgcgtctggacgaaggtctcaagcggctggccaccgtggtacgtcaagcacaggctgcacaggcagcc

SEQ ID NO: 33 - DNA, 9675 bp, Burkholderia rinojensis
atgacgagctttccgactgcgctgcaccaccgaattcacgcgcttgcgcgccttgcccccgacgccccggcgctcgcctcgttcacccccggcacggtgcggctcacgcgcggcgagctggacgaccgcgccgcgcgcctcgccgcgcagttgacggccgccggcgtgacgaccgaggtgcgggtcggggtgtgcgtcgcgcgctcgtgcgacctgttcgtcgcgctgctcgcggtgctcaaggcgggcggcgtgttcgtcgcgctcgatccgcgccatccgggcgcgcggctcgactgggtggcccgcgacgcgggcctcgcgcacggcatcgtcgacgcctcggcggacgccgcgatgcgcgcgcgcttcgcgcgctgcttcgaagtcgcgagcgtggccgagcccgatccggccgcgccgcgcacgcccggcgacgcgcccgtgcacccgcgcgcggccgcctacatgatctatacctccggctcgaccggcacgccgaaggcggtggtggtcgagcacggcccgctcgccgcgcacggcgacgcgctcgcggcctcgctgccgattggggcggacgaccgcgtgctgcatttcgcgtcggtcaatttcgacgtcgcgatcgaggcctggctcgtgccgctcgcggtcggcggcagcgtcgtgatcagcgatccgccgccattcgcgccgcagaccgcgcacgcgttcatggtgcgcgagggcgtgaccaacaccaccttgccgcccgcctatctgcgcgaattcgcggcggtgtgcgcgcgcgacggcgtgccgccgtcgctgcgcgtgctgctgttcggcggcgaggcgatgtcgcaggacagcttcgacgagatccgccgggtgtttcccgcgcagcggctcgtcaacggctacgggccgaccgaggcggtgatctcgccaatgctgtggccggtcgatccgggcgcgacgcccgcgctcgatccgagccagggctatgcgtcgctgccgatcggctggccgatcggacgccgcgtcgcgcgcatcgacggcggcgcgccgcagggcgccgacggcgaattgctgctcggcggcgtgtgtctcgcgcgcggctatcacggccggcccgggctgaccgccgagcgtttcctgccggatccgggcggcgagccgggcgagcgcatctatcgcaccggcgatctcgcgcgcgaacgcgcggacgggtcgttcgactacctcgggcggatcgacgatcaggtgcaggtgcgcggcgtgcgcgtggaacccggcgagatcgccgcatgcctgctcgcgcatccggccgtcagcgacgccggcgtgctcgccgagacggcgggcggccgcactcagctgaccgcctgcgtggtgctgaccgagccgctcgccgatgcggcgctcaaggcgcacctgggcgcgcatctgccggcggcgtggctgccgcaccgcttcgcgcgcttcacgcggctgccgtataccttgaacggcaagctcgaccgcgccgcgctgcgcgattcggtcgcggcgctgccggccgtggccgacgacgatcatgtcgcgcccgtcggcgcgaccgagacgcgcctcgcggcgctgtggcagcgcctgctcgacgaggccgcgccgctcggccgcaccgatcggttcttcgcgcgcggcggcgattcgctcggcgcgatgcagttgcaggccgcgatccgcgccgaatggggcgtcgcgctgcggctcgaggcgctgttcgacgatgcgacgctggccgaactggcggccgcgatcgagcagggcgagcccgatgccgccgcgcccgcgcgcgcgctgaagatcgaggcggcgagcgccgacctgtccgcgccgtaccgcgaccgtcccgcctcgttcgcgcagcagcgcttctgggtgctcgcgcgcacccaggacgcgggcgacgcctatcacgtcgccgtgcaatgggacatcgacggcctgctcgatcccgccgtgctgcaacgcgcgctcgaccatctgctcgcgcgccacgaagcatggcgcacgacgctcgtcgaggacgacgacggcgtggtgtggcagcgcatccaccgccgcctgccggtgacgctcgcgacggtcgacctgcgcggtctcgacgacgcggtgcgcgcggcgcgcctcgccgacctgacccgccagcacgcgggcgcggcgttcgacctgtcgggcgggccgctcgtgcgcgccacgctcgtcacgctgacgggcggcgcgcagcatttcctgctcaccacccaccatgcggtcagcgacggctggagctcgcgctgcgcattcgatgaactgacccgcgcctatgccgcgttcgcggaaggccgggagccggcgtcgccggcgctgccgatccagtacgcggactatgcccaggcgcagcgcgcgatgctcgccgggggcgagggcgcgcgccagctcgactattggcgcgaggcgctcgcgcaggcgcccgcgccgctcgcgctgccgctcgaccgggcgcgcggcgcggccgcggatcatcgcggcggccgcgtggcgctgcgcttgtccgccgcgctgtcggacgcgctgcgcgacaccgcgcgccagctgcgcgcctcgccgttcacgctgctgctggccgcgttcgacgcgtggctgttccgcctgacgggcgagcgcgacctggtggtcgccgcgccggtcgcggaccgcgcgcaggccgagacccggccgctcgtgggcctgttcctgaacacgctcgcgctgcgcgcgcgggtgagcccggcgcagcgcttcgcggcgctggtcgacgcggtgcggcgcgatgcggtcgcggccttcgcgcaccaggacgtgccgttcgatcaggtgctggacgcggtgcagccgcccgcgcggcgcggcgaggcctggctcaaggtcaagttcgcgcagcagttcgatctggcgctgtcggcgtcgctgccgggcgcgacggcgcgcatggcggccgggctcgatctcggcgcgcgcttcgactacgcgctcgatttcaccgacgatccgcagggcatcgagctggtggccgcgttcgcgctcgacggcatcgacgccgacaccgcgcgcgcctggctcgacagctatgcggcgctgctcgcggacgcggtgcgcgatccgcgccagccgatcgcggcgctcgcctgcgcgagcgcggcgacgcgcgcgccgcagcgcggccgcgcgcttgcaaccaccgaacacgtgctggcgcggttcgcccgcgcggcggccgaggcgccgcagcgcgcggccgtggtcgatgcggacgcgagcctgagcttcgcggcgctggatgcctggtccgaccggctggcgcacgcactgcgccggcgcggcgcgggccccgagcaggcggtcgcgctgcgcttcgaacgcacgacgcgcttcgtcgccgcgtggctcggcgtgctgaagtccggcgcctatgcggtgccgctcgatcccgccgcgccgcccgagcggcttgccgccgcgctcgacgcgtgcggcgcgcgctggctgctggtcgagggcgcggggctggacgccgccgccgcggcggcgctcggcgacgcagcgacgccgctcgacgtcgacgcgctgggcggcgagcccgcgccggccgaggcgcggctgcccgcgccgctgccggggcaggcggcctatctgattttcacgtccggctcgaccggcacgccgaagggcgtggtgatcgaccatcgcgcgctggccgactatgtcgacggcctgctcgacgagctggcgttcgcgccggacgcgtcgatggcgatggtgtcgacggtcgcggcggacctcgggcacacgacgctgttcggcgcgctgtgctcggggcgcacgctgcatctgctgcccgcgtcctgcgcgttcgacccggaccgtttcgcgcacgagatgcgcagccgcgacgtgggcgtgctgaagatcgtgccgagccacctgcatgcgctgctcgacgcgcaggcggccgccgacgtgctgcccgcgcacgcgctcgtcacgggcggcgaggcgctgccgtggtcgctcgtcgcgcgcctcgcggcgctcaagcccgcgtgccgcgtgatcaaccactacggaccgaccgaagcgacggtcggcgcgctcgtgtgcgacctttccgcgccggcccaggccgtgctgcgcgaggccgcgctggctgcgccgggcgcgctcggcgtgccgctcgggcggccgctgccgaacgccgacgcgtgcgtgctcgacgcgagcggcgcgccggtgccgccgggcgggatcggcgagctgtacctgggcgggccggggctcgcgcgcggctatctgcgccgcgcgggcgcgaccgccgagcgcttcgtgccggacccgttcacgccgggcgcgcgcctgtaccgcaccggcgaccgcgtgcggttgcgcgcggacggccgcatcgcgttcctcggccgtctcgacgaccaggtcaagattcgcggctaccgggtcgaaccgggcgaggtgagcgccgcgctgcgcgcgctcgacggcgtcgcgcaggcggaaacgctcgcggtcgagcacgagggccggctgcggctcgcgtcgttcgtgacgccggcggccggcgcgcggctcgacgacgccgcgctgcgctgcgcgctggccgcgcggctgcccgactacatggtgccggccgtgctgcaggtgtgcgcgagcctgcccgtcaccgccaacggcaagatcgatcgcgccgcgctgcgcgtgctggccgccgcgcccgcgccggtcgccgaccgcccggccgatgcgccgcaagggccggtcgagaccgtgctggccgcggtctggcaggaggtgctgaaaaccgggcggatcggccgcgaggacgatttcttcgcgctgggcggcgattcgatcctggtgttgcaggtgatcgcacgcgcccgcaagcgcggcgtgaaattcacacccaagcagttgttcgacggcccgaccgtcgcgaagctcgcgcgcgtcgcggtcgcgacggacgcggccgcgccggccgccgcgacccgggcggcgcccgcggcggcgcaggccgacgcgcccatgctgttgcccgcgcaacgacgcttcttcgcgctcgacatcccgcgtcgcggccactggaaccagtcgatcgagctgacgcccgccgcgccgttcgatttcgacgcgttcacgcgcgcgttcgacaccgtgctcacgcatcacgcggtattccgccagcgcttcacgccgaccggcccgcaaggcgagtggcaaccgagcgaagcgccgcgcgcgttcgacacgctgccgctcgcggcgggcgtggcgcgcgacgaaaccgacgcgctcgcgcagttcgacgcgctgcaggccgggctggacctcgaacgcggtccgctcgcctgcgcattcgccgccgcgctgccggacggcgcgacgcgcctctatctcgcgattcaccacctgatcgtcgacggcgtgacctggcgcgtgctgctcgacgatctcgacgccgcctatcgcgcggccgccgagcgccgcgcggtgcggctcgcgtccaccggggcaagcgcgtcgcagtgggcggcgcgcctcgcgcgcgcggcgcgcgatccgcacgggccgttcgcggccgagctgccgggctgggccgcgctcgccgcgccgcacgaggacctgccgctcgatcatccggacgcgcgcgcgaccaacgccgacgcggcggtcgtgatccaggcgctcgacgcggacctgacgcgccgcgcgctgaccgaggcgaacggcgcataccgcacgcagatggtcgaattgctgatcgcggcgctcgcgcaggcgctcggccgccagaccgggcaggccgcctgccggatcgagctggagggccacggccgcgaggcgctgttcgacgagctggacgcgagccgcacgccgggctggctcacgagccactatccggttgcgttcgcggtggcggatacgccgctcgcgacgctcgcgggcgtgaaggacagcttgcgcgacgtgccgaacaaggggctgggcttcggcgtgctgcgccactacggcgacgatgccgcgcgcacggcgctcgcggcggtgccgcggccgcgcgtgaccttcaactacctgggacagttcgacgcgccgcgcgacgcggcgctcgtgccgcgcttcggcggcgcgggcctcgaacgcgatccgggcggcccgatcggcaacgcgctcgcgattcacgcgtatatcgacgcgcacgacggccgcacgctgcgcgtgcactgggtgtacggcgcgacgcagttcgagcgcgcgaccatcgacgcgctggccgcgcgcttctcggccgcgctgaccgaattgaccgacgcctgcgccgagcgtctcgcgtctcgcggcgcgggcgcgaccccgggcgactacccgctcgcgcgcgcggcgggcctcacgcaggcggcgctcgaacgcctgccgttcgacctgcgcacgatcgacgacatctatccgctcgcgccgatgcagcagggcatcctgttccacgcgctgttcgcgcccgagcagtcgacctacgtgaaccagctggtcgcgacgctcgacgcgccggacatcgcgcgcctgcgcgccgcgttcgaggccgcgccgccgcgccacgacatcctgcgcaccggcttcacggccgacgaggccgcgccgatgcaggtcgtgcaccggcaggcgacgctgcccgtcgaggaactcgactggcgcaacctcgccgagcgcgacgcggcgctcgacgcgtggctcgcggccgaccgggcgcgcggcttcgatctcgccgcgccgccgctgatgcgggtcgcgctgatccgtttcggcgacgcggaatggcgtctcgtgtggacgcgccatcacctgctgctcgacggctggagcacggcgcgctgcttcgcggacgtgctgcgcgactacctcgaaccgccgcgtccgaacccgttcgccgcgccggcgcgggtgcgctatcgcgacttcatcgcgtggctcgcgagccgcgacgcggcgtccgagcgcgcgttctggctcgaccggctcgcgcgtctcgacgaaccgacgctgatcgccgagcgcgagccgcagccgggcgagacgggcgcgaaccgcacctggcgcgccacgctcgacgcggcgacgaccgcgcgcgtgggcgacgccgcgcgacagctgaagatcaccgtcaacacgctcgtgcagggcgcctgggcgctggccttgcagcgcgtgacgaatcgcgcggcggtggcgttcggcgcgacggtcgcgggccggccggatgcgctggccgagatcgacacggtgctgggcctcttcatcaacacgctgcccgtgatcgccgcgccgctgccgcagcgcagcgcgcgcgggtggctcgcggacctgcagcgcgacaacgcggccgcgctcgaccacgcgcacacgccgctctacgagatccagcagtgggcgggccagggcggccgcgcgctgttcgacacgctggtcgtgttcgagaactatccggtcgacgaggcctggcagggccgcgagccgcgcgcactgcaaaagcgcgacctgcgcaacatcgaggcgaccgatttcgccctgacgctcgtgatcgaggcggggcagacgctcacgatcgattacggctacgacacggcgcggctcggcgaggcgcgcgtcgcggcgctgcacgacgcgttcgtcgcctgcctgggcgggctcgtcgccgcgccggacgcgccgctgggcgcgctggcctgcgcgagcgacgcgacgctcgcacgggccgcgcaggcgaacgcgaccgcgcgcgactggccggcggcccagcaggcgccgctgcaccggcaattcgaggcggccgcgcaggcgacgcccgacgccatcgcgctggaaatgacggagccgtccggcgcggcgcgacggctcagctatcgcgaactcgaccagcaggccgagcgcgcggccgccgcgctgcgcgtggccggcgtgctgccggacacggcggtcgcgttgtgcgtcgagcgttcgttcgacatggtgatcgcgctgctcggcgtgctgaaggccggcgcggcctacctgccggtcgaccccgactatccggccgaccgcatcgactacctgctgcgcgacgcgcggcccgccgtggtgctcacgcaggcgcatctgcgcgagcgggtcgcgacggccgtcgcgggcgcgaccccggtggtcaccgtcgacgcgctgctgcagggcgcgccggagcccggcgcgcgcaccgcggtcgcggccgatcagctggcctacctgatctacacctccggctcgaccggcaagccgaagggcgcgggcaacacgcacgcggcgctcgcgaaccggatcgcgtggatgcaggacgcgtaccggctcacgcgcgacgacgtcgtgctgcacaagaccccgttcggcttcgacgtgtcggtctgggagttcgtctggccactcgcgatcggcgcgacgctcgcgatcgcggcgccgggcgatcaccgcgatccggcgcggctggtcgagacgatcgccgcgcaccgggtcacgaccttgcatttcgtgccgtcgatgctggccgcgttcgtcgcgcatctcgacgatttcggcgtcgcggcgcgctgcgcgagcatcacgcggatcgtcgcgagcggcgaggcgctcgcgcccgcgctggtcgcgcgcgtgcaggcgctgctgccgcacgcgcggctgttcaacctgtacggcccgaccgaggcggcgatcgacgtgtcgcactggacctgcacggccgacgacggccgcgcggcggcggtgccgatcggccatccgatcgcgaacctgcagctgcacgtgctcgacgtggccggccatccggcgccggagggcgggatcggcgaactgcacctgggcggcgcgggcctcgcgcgcggctacctgggccgcgcggcgctgacggccgagcgcttcgtgccggacccgtccggcggcggcgcgcgcctgtaccgcacgggcgacctggtgcggcgccgcgccgacggcgcgctcgactacctgggccgcctcgacgcgcaggtcaagctgcgcggccagcggctcgaaccgggcgagatcgaggcgctgctgcgcgccgcgccgggcgtgcgcgacgcggtcgtgatcgtgcacgacgaccagctggtcggctatgtcgcgcacggcgcgaaccccgcgccggacgccgccgcgctgctcgatgcgttgcgcgcgcaactgcccgcctacatggtgccgtcgcagctgatcgcgctggaggcgctgcccgtcacgccgaacggcaagtgcgaccggcgcgcgctgccgacgcccgagcgcgcggcgcgcgcggtgacgccgccgcgcaccgagacggaacgcacgctcgccgggatctggcagcgcgcgctgaagctcgacgcggtcggctgcgacgacgatttcttcacgctcggcggccattcgctgctcgcgacccaggtcaacgcgcaggcgaacctgcactgggcgctgacgctgccgctgcgccagctgttcgaggaacgcacgctcgcgcgctgcgcggcggtgatcgaccacgcgctcgccgcgcgcggcggcttgtccgggcaggacgccgcggacgcgatcgatgcattgctcggcgagctggaaattcaa

SEQ ID NO: 34 - DNA, 4692 bp, Burkholderia rinojensis
atgacttacgaaacacccgtcgacgccgttgccatcatcggcgccagctgccgcctgcccggcgccgccaccctcgaacagttctggtcgatgatcgccgacggccgggtcgggatcgagcgcttcggcgccgacgcggcgcgccgcgagggcgtgccggagacggtgctggcccagcccggcttcgtcggcgcgggcggcccgctcgacggcgtcgaccagttcgacgccgcgtacttcggcatcccgccgtcgcaggcggcggccatggacccgcagcagcggatcttcctcgaatgcgtgcacgaggcgctcgaacgcgccgggcacggcgcggtgcgcggcgcgcgcgtcggcatctgggccggctcggccagcgtcgactatctcgtcgaccacgtgcgcgaccggctcgatcgcgcctcgccgaatcgctatctgcagcaatgggtcggcgtcgacaaggattatctcgcgacgcaggtcgcctaccggctcgacttcggcggcccggccatcacgctgcagacggcctgttcgacctcgctcgtcgcggtggtccaggccttgcaggcgctgctgagcttccagtgcgatttcgcggtcgcgggcggggtcagcgtcgcgctgccgcagcggcaggggcatgtatacgaggagggcagcatcctgtccgcggacggcgcgtgccggccgttcacgaccgacagcagcggcacggtgttcggcaacggcgcgggcgtggtggtgctgcgccgcctggaggacgcgctcgccgacggcgatccgatcatggcggtgatccgcggcggcgcggtcaacaacgacggcgcggcgaaggtcggcttcaccgcgccgggcggccgcgggcagaacgacgtgatccgccaggcgctcgcgctcagcgaggtcgacggggcgtcgatcggctatgtcgagacgcacggcacgggcacggcgatcggcgacgaggtcgaactggccgcgctgcgcgcggcgctgggcgagcgcgccgacgccgacgcacgctgcgcgctcggcacgctgaaggcgaatgtcgggcatctgaacgcggcggcgggcgcgtgcgggctgatcaaggccgcgctcgcggtcgagcacgggcagattccgggcgcgctcggcgcggcgcaggcgatcgacgcgctgcgcggcgagtcggcgttctacctgccggcggcgacgacgccgtgggcggcgccggttcgacgcgcgggcgtgagttcgttcggcatcggcggcaccaatgcgcacgtgatcatcgaggccgcgccgccgcgcgcgccgcgcacgccgcacgtcgcgccgctcctgctgctgtcggcgcgcggcgacgcggcgctgtccgcgttgtgcgcggactatgcggcgtttctcgaacggaatcccgaactgcggatcgaggatgcgtgcctgacggcggctctcgggcgtcgtcattgggagcagcgcgcggcgtttcgcgccgaatcccgcgcggaactgatcggtgcgctgcgcgcattcgccgccggcgagcgcgaagcgggcgtgatcgcggcggcgctgccggcgcgcgtgccggaagtgagtttcgcgttcggcggcgtgcgcgacctcgatgcggcgctggccggcgtgcaggcctggcaggcgagcggcgtcacgccggccagcgtgtgcgcgacgggcgacggcgtgttcgcggcggccttcgcggcgggcgcgctgagtctcgacgatgcgcggcagcgccgcgtggcgcgcgccgtcgcgccgtcgctgctgtggatcggggcggcctcgggcctgccgctcgacagcgcggaagccgtgcgcgacgaactcgcgaacgcgaacgcgacggcggacgccgccgccacggcggcgctggaagcggcgggcgcggaatacgtgctcgatttcggcgaggtggcgctgggcgcgcaggcggccggcatggcgtcgctcgatccggcttcgccggacacgctcgcgcggctgtggacggccggcgtgacgctcgatctcgcacagcactaccgcgacggcaaccgcgtggtgctgccgacctatccgttccagcgcgaacgccactggatcgaccgcgcgccgcgcttcgcgacgggcggtgcgagcccgttcctcggacggcgtactgacgcgcccgcgctgaacgcgatcttcttcgacgccgaatggagcgtggccacgctgccgttcctgcaggatcacgtgatctacgacaaggtcgtggtgtccggcgcggcgctcgcggtgatgatcgccgacggcgtgcgtgtgctcacggaatcggacgcctgcgtgctgagcgacctgcgattcccggccgcgctggtgattccgccgggtgcggcgcggcacgtccagctgcaactggtgcgggacggcgagggcttcgaggccacggtgctgacgcccgattctgccgacatccatgcgacggcgcgggtcgacgcgggcgaagcgccgggcgtcgcgccggcgcagccggtgcagggcgaagcgatctccgccgcgctgctcgacggctggctgcgcgcgcgcagcgttgtcatggggccgaccttccggcggctctcggagatggtggtcggcgatggcgaagcatcctgcgcgatgcgcgccgacgccgacgacgcggggtggcagctgcacccggggattctcgattcggtgctgcagctggtggcggccgccgcgaggcccgacggcagcaaggcgttcgtgccgacccgcatcgcgcggctcgcgctgcacgggcgcacgggcgccgggatgcgctgccatgcgtcggccgggcgcggcgcggcgagcgtgttcgacgccaaccggatgctgatcgagctgaccggcctcgaatcgcgcgaggtcacgcgcaatgaattgctgcgcatcgagccgctgcgcgagggctacgcggtcgaatggcgcgacgtggcggacggcgagcgcgccgcgttgccggagccgatcgtgatcctgcgcgacgcggggcaggtcgcggcgggcttggcctcgctgttgcgcgacgagcgcaaggacacgctggtcgtggcgagcgtggacgagattccgttcgaccgggcgggcctgatcgtcgattgccgcgggatcgaggcgcgcgcggacgcgcccgcgccggcgctctacgaaggggcgctcgcgttgttcgcgacggccgcgcggcgcgacctgccgtgccggatcgccgtcgtgctcgcgccggatgcgcccgcggccgcgccgctgcaggcgctgtcgcgcgcggtggcgatggaaacgccgcatctccagacgctcgcgctgcatgcgggcgacgcccgcgcgatccgtcgcggccttgacttcatcgaccgggagaccgaagtcgcggtgcgcggcgaggcggtcagcgcgccgcgcttcgacgagcgcgcgctgccgcgccgcgcggatctcgcgctcgcgggcgacgcgacctggctgatcacgggcggcctgggcgaactgggcctgcgcgtcgcgggctggctcgccgcgctcggcgcgcgcacgctggtgctgaccggccgccggccggccgatgccgccgccgaggcggtgctggccgcgctgcgccgcgacggcgtcgaggtgcgggtgaagcaggccgacgtggcggtggcggcggacgtcgatgcgctgctcgccgagatcgacgcgacgctgccgccgctgcgcgggatctaccatctggcgggcgtggtcgaggaccgcctcgtcgtcgacgtcacgcccgagtcgctggccgcgaccctcgccggcaaggcccagggcgcatggctgctgcacgagcgcacccggcgtcatccgctcgagcacttcgtgctgttctcgtcggccgccgcggcattcggcgccgcgggacagtcgacctacgcgatggcgaacgcctacctcgacgcgctcgccgcgcaccgtcgcgcgcaagggctgcccgcgcagtcgatggcctgggggccgtggcaggacgtcggcatgctggcccgcacgagcgcgaccgcgaagcggcggctcgcgcagctgggcatcggccagatcgacaccgagtgcggccgcgcgaccttcgagatcgcgctggcggccgagctgccgccgcacatcgtgctgctgccggtcgactggccgcgcctgatcgagcagtggccgccgcatgtgccggcgagccgcttcgccggcatcgccaccgcgcagccgggcgccggcctcacgtcgtcggtcagcgagctgctggcgctgcccgccgacgaacggcggccgcgcctgttcgcgctgctggcggaagacgcggcggccgtgaccggcacgccgctcgcctcgctcgatccggagcgctcgctgttcgactacgacctcgattcgctgctgatcaccgatctgcgcgtgcggctcgaaaaacgtttcggccgcacgatctcgaccacggtgattttttcgaatccgaccatcgccacgctcgcggaccatctggcgcgcacgctgttcggcgcgacggacagcgctccggcgacgcagccggtgccggcttccgccgcgcgggctcacgccgccgagatcgagccgtcgaccgatacggcgcagctgtctcaagaggagatcgtcgaaatgctgtccgcgaaactggacgaacttcgcggagcgggggcgcga

SEQ ID NO: 35 - DNA, 4455 bp, Burkholderia rinojensis
atggctgctgcacgagcgcacccggcgtcatccgctcgagcacttcgtgctgttctcgtcggccgccgcggcattcggcgccgcgggacagtcgacctacgcgatggcgaacgcctacctcgacgcgctcgccgcgcaccgtcgcgcgcaagggctgcccgcgcagtcgatggcctgggggccgtggcaggacgtcggcatgctggcccgcacgagcgcgaccgcgaagcggcggctcgcgcagctgggcatcggccagatcgacaccgagtgcggccgcgcgaccttcgagatcgcgctggcggccgagctgccgccgcacatcgtgctgctgccggtcgactggccgcgcctgatcgagcagtggccgccgcatgtgccggcgagccgcttcgccggcatcgccaccgcgcagccgggcgccggcctcacgtcgtcggtcagcgagctgctggcgctgcccgccgacgaacggcggccgcgcctgttcgcgctgctggcggaagacgcggcggccgtgaccggcacgccgctcgcctcgctcgatccggagcgctcgctgttcgactacgacctcgattcgctgctgatcaccgatctgcgcgtgcggctcgaaaaacgtttcggccgcacgatctcgaccacggtgattttttcgaatccgaccatcgccacgctcgcggaccatctggcgcgcacgctgttcggcgcgacggacagcgctccggcgacgcagccggtgccggcttccgccgcgcgggctcacgccgccgagatcgagccgtcgaccgatacggcgcagctgtctcaagaggagatcgtcgaaatgctgtccgcgaaactggacgaacttcgcggagcgggggcgcgatgagccagatcgatacgactgccctgatgcagaacgcgctgcgcgagatcgagcgtctgcagcgcaagctcggcggcgtcgagcagcagctgcacgcgccgatcgccgtggtcggcatgggttgccgcttcgcgggcgccgattcgccggaggcgctgtggcagcgcctgctcgacggcgcggacggcgtgcgcgaggtgccggccgagcgctgggacgccgagcgctacttcgatgcggacccggacgcgagcgggcgcatctactgccgggccggcagctttctcgacgatgtggcgtcgttcgacgccggattcttcgggatttcggcgcgcgaggcggcgatgctcgatccgcagcagcgcatgctgctcgaagtggtgtgggaagcgatcgaacgcgccggcattccggcggccgagctgaaaggctcggcgacgggcgtgttcgcgggcgtgatgcaccaggactacgcgcaccgtttccgcgacgcggacgacgtcgacctgtacacggcgtcgggcaatgcgcccagcgtgctcgcgggccgcgtgtcgcacgtgctcggcctgcacgggccgacgctcacgatcgacacggcctgttcgtcgtcgctggtcgccgtgcatcttgcctgcaatgcgctgcgtgccggcgaatgcgacatcgcgatcgtcggcggggtcaacgtcgtgctgtcgccgttgtcgaccgcggccgagtgtcgggcgcacatgctgtcgccgagcggccgctgccgttcgttcgacgacggtgcggacggcttcgtgcgcggcgagggctgcggcgtggtcgtgctgcagcggctcgccgacgcgcaggccgcgggccgcgcgatcgatgcgctgatcgcgggttcggcggtcaaccacgacggccgcagcgcggggctgaccgtgccgaacgagcatgcgcagcgcgagctggtgcgcagcgcgctgcgcgcggcgcgcatcgacgcgtcgcaggtgcgctatgtcgaggcgcacgggaccggcaccgcgctcggcgatccgatcgaggcggcggcgctcgcctccgtgttcgcgggccgcgcgccggacgcgcgcgtgctgctcgggtcgatcaagagcaacttcgggcatctcgaaggcgcggccgggatcgccgggctgatcaaggcggcgctcgcggtgcgtcatggcgtggtgcccgccacgctgcacgtgcgcacgcccaatcgcggcatcgagtgggacacgctgccgctgcgcctcgcgctcggcaacgagcgcatcgacgcgggcgacgcgccctgtgtcgcgggcgtcagttcgttcggcttcagcggcaccaatgcgcatgcggtggtcgtcgcgccgccgcgcgtcgatgagggcggagcggcgcgtgatgtggccgaggctgaggttgaagctgaggcgggcgcgtgcttgttgaccgtctccgcgaaatccgacgcctcgctgcgcggcaatgccgcgcgttatgccgatcacctgacgggtctcgacgcgtcggcgtgggcggcggcctgccatgcgtcgcatgtcgcgcgttcgcatttcccgcaccggctcgcggtggtcgccgcgagcgccgacgcgatggcgcgcgagctgcgccgcttcgcgcgcggcgaggacgcggccgtcgcgagcggcgtatgcggcgcgatgccgatcggccgcgcggcggcaaccgccgaggctgacgcggcgcaggatccggccgcgcgcctggcggcgctcgcgcagcgctacgtggccggccagccggtcgactggccggcggcgatcgtcgccggcggccgtctcgcgccgctgccgacctatgccttcgaccggcaacgctactgggtcgacgagcgccgcgcgaacgcgtcgtcgccgctgtaccgcgtcgcctggcagccggcgccggcgccggccgtctcgcgtcgcccgggcggccggatcgtcgcgggcgatccggcgtgctgcgcggcggtggcgcgcgcgctcgacgccgtgggcgaacgctgcacgatcgtggccgccgagatcgaggcgatccgcgcggcgggctcggccgaacacggcatcgtgcttgcgttcgacgacgcggcgcgcgaatccgcgcgcgagccggtggcggccgtcgcgcgtcacggcgcgctgctgggcgcgctcgcgcgccatctggccgagacgccgtcggcggggcccgtcacggtcgtcacgcgcggcgcgctggcgaccgggccggcggaggacgtcgacccggtcgccgccgcgttgagcgccgccgtgcgggtggcgcgacgcgagcagggcgaggcgtggcgcggcacgatcgatgtcgacggtgcgccggcctcgttcgacacgctcgcggcgctgcttggcgacgcatccgccgaggagcagcaggcggtgcgcggcgcgaccgtgctggtgccgcgcctgcggcgcgcgggggccggcgcggccgacgcgatcccggcactcgacgccgacgcggcctatgtcgtgacgggcggcaccggcgcgctcggtctcgcgaccgcgcgctggctcgcgggccgcggcgcgcgtcatctgctgttgatcagtcgcgggggcgaaaccggcgaggccgtgcaggcggcctgcgcgcgcttgcgcgccgacggcgtcgaggtgcgcgcggcggcggccgacatcgccgacgaagacgcgttgcgcgaggcgctcgccacggccggccggccgattcgcggcgtcgtgcactgcgcgggcgtcgtgcgcgatgcgccgctcgacacgctggacgcggcggcgttcacggccgtgctgcgcgcgaaagtgggcggggcggtgttgctggagcgcctgaccgatgcgcagccgctcgacttcttcctgctgtactcgtccatctcggtcgtggtgggccgccacgggcaggcggcgtatgccgccgcgaacgcgtatctcgacgcgctcgcgcagcggcgcagcgcgcgcgcgcgcccggcgctgtcgatcggctgggggctgtgggcggccggcatgggggcggcggacgccaggacggccggccggatccgtgcgggcggcctgcatccgctcggcgaagccgaggcgttcgcggcgctggagcaggccttcacgggcgagccgcatgtgatcgtcgcggcgatcgatcttgcgcggatcgccgcgcagcccgacctgccgcgcctgatcgaaggcctcaccggccgcccgccggccccgcgcgcgcggaccttgtcgttcgagcagctgcgcgggcgcacggccgacgcgcgccgcgccttggtggccgagtatctcgacgccgaattgcgcgcggtgctgtcgagcccggcggcgctgccgcatcaaacctcgctgctggatctcggcgtcgactcgctgaccggcgcggaactgcgcaatgcgctcgaacgcgcgttgggcgtatcggttgcgatcacgcacctgatcgacggctcgtcgctcgacgccttgatcgcgcgcgtcatgacgcaggtggaacgacggctcgtgaccgaacagacctcggccgccggcgccgacacggaggaaatcacgcta

SEQ ID NO: 36 - DNA, 7548 bp, Burkholderia rinojensis
atgctcaaggcgtttgtcgaaacatcagccgctataccgctgaaccgtatcgacatcctctccaagcaagaacgccaattggttcttggagaatggaacaacaccagacaggcgctgccagaaacgacgctggaagcgctggtcgaacaacaggtcgaaaaatcgcctgacgcgattgccgccgtgttcgacgatcaggcgttgacgtaccggcagctcaacgcccacgccaatcagctggctcgcatgctcgttgcctcggggatcgggccggaatccgtcgttgccgtcgccattccgcgttcgctcgatctcatcgtctcgctgctcgccgtcgtcaaggccggggcggcttatctgccactcgataccgactatcccgccgaacgcctcgccttcatgcttcgcgacgccaagcccgccgcactcatctcgcgcggcgacgtgctcgccctgctgcccgaaaccggatcgattcctgtcttgcagatcgatggagacgcccttctcgcgcagttggacacgcagcccgaccataacctcgacaatcggactcgcgtcgcgccgctttcggtactgcatccggcctatgtgatctatacctcggggtcgacagggactcccaagggcgctgccaacacccatgtcgggatcgtcaaccggctgctctggatgcagcatgcctatcaactccagcgcgatgacgcggtacttcagaaaacaccttccagcttcgacgtttccgtctgggaattcttctggccgttgatcgctggcgctcgcatcgtctttgctcgtcctgatggacatcgcgatcccgcctatctcgctacgctcattcagcagcaacgcatcaccaccgcgcacttcgtgccctccatgctcgaagcattcctgctggagcctgacgccgctcaatgcgaaaacacgctgcgccgtatcgtctgcagcggtgaagccctctccgccgatctcgccaagcgcgctcatgccactctcggcacgccgctgcacaacctttacggcccgaccgaggccgccgtcgacgtctcctactgggcttatcgttctgatgaggtgattggcaacgccgcacccatcggcgcaccgatctggaatctccagctttacatcctcgatgaggcgcttcgtcccgtgccgccgggtgtgcccggcgagttgtacctcgccggcgcgggcctcgcccgtggctatctgaaccgcttctcgctcacctccgagcgcttcgtcgccaatccgttcaccccgggcgaacgcatgtaccgctccggcgatctcgcacgctggcggcatgacggtcagatcgaatacctcggccggaccgaccatcaggtcaagatccgcggcttccgcatcgaactcggtgaaatcgaagcgcgcctcgtcgaccatgaggccgtgcgcgaagccgtggtcgtcgccgcaggttccgatgcggacaaacgtctggtcgcttatgtcgtcgcccctgctcaagcgttctcggatgaacatgcgtccgaacacgacgcggcccaagcgatgatgaacgcactgcgcgcgcacctcgccgaacgtctgcccgagcacatggtgcccgctgcattcattcgtctcgacgcgttcccgctcacccccaacggcaagctcgaccgcaaggcactccctgttcccgaccaggatgccttcgtccgacaggattacgaggcaccgcaaggcgaagtcgaaacgatcctcgccgacatctggagcgaactcctcggtatcgacaaggtcagtcgccacgacagcttcttcgctctcggcggtcactcgctcctcgccgtcaaactcatcgaacgcatgcggcagcgtggcctcagcctgtcgatccgcgatctgttccgcacgcctacggtcatcgcgctcgcccagaccctcggccagcaccgcgagatcgaagtcccggccaatcgcatcacccctgaaaccaccgcgatcaccccggacctgctgcccctcatcgacctcacccaggccgacatcgaccacatcgtcgcccaggtccccggcggcatcgccaacatccaggacatctacgccctttccccgctgcaagacggcatcctgttccaccacctgatgtctaccgaaggcgacccgtacctgctgaccagccaaatcgcctttgccacccgcgacctgctcgaccgctacctcgacgccatccagcaggttgccgaccgccacgacattctccgcaccatcttcgcctggcaagagctgtccacaccggcccagatcgtcctgcgccacgcgaagctgcccatcgaggaataccgcttcgatccggaacacggccccatcgtccatcagctggcgcagcgcgttgacccgcgtcatcatcgcatcgacctgacccgcgcgccgctgctgcaattcgcgattgcccaggacaccagcggccgctggattctccagatgctcctgcaccatctggccggtgaccactccacgctcgaaataataaacgccgaagtcgacgcaattctctccggccgccacgacaccttgcttcgcaccgtgccattccgcaacctcgtggcgcaggcgcgattcggcatcagcgaagcagcgcacacccgcttcttcaccacgatgctggccggcatcgacgagccgaccctgcccttcggcctcgccgaagtccaccgcgacggctcgcagatcagcgaggcccatctgcccctgccgcgctcgctgagcgaccgtctgcgcgcccaagccaagcgcgtgggcgtcagcctcgcgagcctctgtcacctcgcctgggcgcaggtgctcgcgcgcaccagcggacagcatcaggtcgtattcggcaccgtgctattcggccgcatgcaggcgggtgacggctcggatcgcgcgatgggcctgttcatcaacaccctgccgattcgcctggatctcgacgacacaccgatcgaagccagtgtgcgcaccgcgcatgcgcggctcgcggacctgctcgtgcatgaacacgcgtcactcgcgctcgcgcagcgctgcagcggcattccggccggctctccgctgttcagcgcgctgctgaactatcgacacagtgcgccgcatcccctgcatcaggtcgcttccaccgaggtcgaatcgctcggcagcgaggagcggaccaactatccgctcactttctcgatcgacgacttcggcgacgcgctcggcctaaccgcccaggtcgtcgcgccgctcgacgccgcacgcatctgcggctacatgatgcaggccctgcacagtctcgccgaggcgctggaaacaaacccggcgctcccggcgcgtcagttgaacatcctgccgtccgacgagcgcaggctgctgctcgacacctggaatgccgtcggtgcgcacgacacgtccgccgccagcctgccgcaactgttcgaggcccaggtcgcgcgcgcgccgtccgcgcccgccctcgtatgcggcagtcgcacgctgagctacgcggagctgaatacccatgccaatcgcctcgcacatcgcctgatccgcctcggcgtgcgtccggacaccctggtcgggatctgtgtcgagcgaagcgtggccaccgttgtcggcctgctcgcgatcctgaaggccggcggcgcttacgttccgctcgatccggcctactccggcgagcgcctcgcgcatatcgtcgaggacgccgcccctcgcctgctgatcgccgatgcggcgggacgcgccgcgctcggtgacgcaacgcttgccccgctgactgtgctcgacccgaacgaaaccctggatgagccagcggacaaccccgtcgcgaccgatctggccgcgcatcacctggcctacgtcatctatacgtcgggctccaccggcaagccgaaaggcgtgatggtcgagcatcgcaacgtgacgcgcctgttcgacgccactcacccctggtacggtttcgacgcgaacgacacgtggtgcctgttccactcgttcgccttcgatttttccgtctgggagatgtggggcgcgctgcgctacggcggcaagctcgtgatcgtgccgcatgcgatcgcccgttcgccgcaggatttccaccagttggtgtgcgaacaacgtgtcaccgtgctcaaccagacgccgagcgccttccgcaccttcatcgccagccagtcgcacagcacgctgcgcgaccggctgcgctacgtgatcttcggcggcgaagcgttggaacccacgatgctgcaggcgtggtacgcgacccgcgacgagtgtgcgccgcaactcgtcaatatgtacgggatcacggaaaccaccgtgcacgtcacctaccggccgctcctgcaacacgacagcctcgccgcgagcagccccatcggcgaacggattcccgacctgcggatctatgtgctcgatccgtccggcgagcccgcgccgatcggcgcgatcggcgagatgttcgtgggcggcgcgggcgtcgcgcgcggctacctcagccgtcccgaactgaatgcggagcgcttcctggccgacccgttcagcccgctgcccggcgcccgtctgtacaaaaccggcgacctcgcgcgctttctgcccgacgggacactggaattcctgggccgtaacgaccagcaagtcaagatccgcggctttcggatcgaacccggagaaatcgaggcgcgcctcgtggagcacgggatggtgcgcgaggccgtggtgctcgcggtcgacgcggatgcggacaagcgactcgtggcgtatttcatcgcagatgccgccgcacccggcgacacgcccgccgcagccgcgctgcgcgcgcacctgatcgagcgtctgccggaatacatggtgcctgccgcgttcgttcagctcgatgcgttcccgctgacaccgaatggcaagctcgaccgcaaggcgctccccgctcccgatcaggatgccttcgaacgccaggtctacgaggccccgcaaggcgacatcgaaatcgcccttgcccgcatctggagcgagctgctcggcatcgacgcgatcagccgccacgacagtttcttcgccctcggtggtcactcgctgcttgccgtcaagctgatcgagcgcatgcgtcagcgcggattgagtctcgcgatccgcgacctgttccaggcgcccacgcttgccgcgctcgcgcaaagcctgggcggacatcgcgagatcgaggttccggtgaatcgcattacgcccgaaacccgcgccattacgcccgacctgctcccgctcatcgacctcacccaggccgacatcgatcgcatcgtcgaacgggtgcccggcggggtatcgaacatccaggatatctatgccctgtcgccactgcaggacggcatcctgttccatcatctgctgtcgaccgacggcgatccttacctggtcgtcggccaactcgcgttcgagacgcgcgacctgctcgaccgttatctgaatgccgtacagaaggtggtcgatcgtcacgacattctgagaaccgcgtttgtgtgggaaggcgtgtcgacgcccgcgcaggtggtttggcgtaacgcgaggttatccgtcgaggaatgccgtctcgattcggcccacggtccgatcgccgcgcagctcgccgcgcgcttcgacccgcatcactatcgcgtcgatctgacgcaggcgccgctgctgcgcttcgcggtgaccgacaacacggatggccgctggattcttcaactgctgctgcatcacctgatcggcgatcattcgacgctcgacatcctgaatcaggaagtgcaggcgttgctgctggatccggaccaagcgctgcccgacgctcagccgttccgcaatctcgtggcgcaggcgcggctcgggaccagtgaagcggaacacatgcggttcttcacgtcgatgcttgccggcatcgacgagcccacgctgccgttcggcctttcggaagtgcatcgcgacggcgcgcgtgtccgcgaaacccagctgatgctgccgacggtgttgaaccagcggctgcgcgcgcaggcgaaacgggccaatgtcagcctcgcaagcctgtgccatcttgcctgggcccaggtgctctcgcgcaccagcggccgcgatcaggtcgtgttcggcacggtgctgttcggccgcatgcaggccggcgacggcgcggaccgggcgatgggcctgttcatcaatacgctgccgatccggcttgatctcgacgacacgccggtcgaggcgagcgtgcgagccgcgcatgctcgcctcgcggatctgcttgcgcacgaacatgcgtcactcgcgctcgcgcagcggtgcagcagcgtgcccgccgaatcgccgctgttcagcgcgctgctgaactatcggcacaatgcgcccgattcactcaatccgattgccttcgacgggatctcgctcgggcatgccgaggagcgcactacctatccgctcgtgctgtcggtcgaggatttcgggcaggcgctcgggctgaccttgcaggccatcgaggcgctggatgcggagcgtgtttgccgctacatggcgcaggcgctcgaaagtctggccgacgcgctggaatacggatcgggagtggcggtgcgcagcctggaggtgcagccggctgcggagcgggcgctgctgctcgatgagtggaatcgcacgcgtcgcgatcacccgactggcgccaccgtgcagcgcttggtcgagcagcaggctgaacggacgccttcggccatcgccgtgcggtttggagatgtcgcgctcagttatggcgaattgaatgcgcgtgccaatcggctcgcgcatcatttgatcgagcttggcgcgcgcctggatatgccggttgctgtttgtgtcgagcgcgcgcccgccatgattgttggcgtactcgcgattcttaaagcgggggcggcttatctcccgctcgatccggcttaccccgctgaccggctcgcgcacattctcgatgacgccaatcccggcatcgtcctcgcagataccgctggcctcgctgctatcggcgatgcgccgctcgccaaccgggctgtcctcgatcccaatgaggcgcttgtcgacgactccatcgtcctccatgccgggcaagcttccgaactcaacatcctgctcaagctttccgcttatccgacgaccaacccggtggtcgatgggctgagcgaccggcatctggcctatgtgatctatacctcggggtccaccggtgtgcctaaaggcgtgatggtcgaacatcaaaatctggtcaacctctgccactggcatatcgatgccttcgcgcttcggtccggatcgacttcggccatgacggccggcgtggcgttcgatgccaccacctgggaactctggcccagcctcctctccggcggcaccctcgtcctgcctccggtgcatgccgctcgcgatccgattgccctgctcgactggtggcagcagcagcaactcgacgtctccttcctcgtcacctcgctcgccgtcatggcgatcgaccgcaagcagttaccgcccaatctccgctatctgctcatcggcggtgaacgtttcccgggt

SEQ ID NO: 37 - DNA, 6111 bp, Burkholderia rinojensis
atggcggctggacgagggcggcgagccacgctcggcctggctcggcgaaccgccgggcggcatgcgctcggccgcgatgcggcggcgctacgcgctcgacgtcgtggcgcaggtccacgacggccgcctgcgcgtcgactggctgtacagcaccgcgctgcaccggacgcagaccgtcaccgcccttgccgcccggttccgcgacgcgctggacgccgtgctggcccactgcctgtcgccgcaggcgggcggcctcacgccatcggacctgccgctcgcccatctcgaccagaacgatatcgacgaagtgctacagctattgaacgagcaatcatgaatccaaccttgtcgaacaccgcccagcaagcccgctcgaacgtcgagacgatgctgccgctgacgccgacgcagcagggcctgctgtttcacacgctgaaggcgccggagtccggcgtctattacgagcaggtcggctgcaccttccaggccgcgctcgacgtcgccgactaccggcgcgcgctcgaagcggtggtcgcacgccacggcgtgctgcgcaccggttttctgtgggatgggccgtcgaagcccgtccaggtagtcttccgccacgtcgagctgccgtggatcgaggaagactggcggcacctcgatcgcgacgagcagcagcgccgccttgccgcctatcgcgaggcggaccggcggccgggctttcacctgagccgcgcgccgctgatgcgttgcgcgttgttccgcaccggggcgcaatgctacgaattcgtctggagctaccaccatctgctgctcgacggctggtcggtgcagatcgtgctcggggaagcgctggcctgctacgacgcgtaccggcgcggcgacgcgccggccttgccgccgccccagccgtacagcgcgttcctgcgctggctcgacgcgcaggacggcgcggcggccgaggcgttctggcgcgcgcgcctgggcgacgtccgcgcggccacgcccctgccgctcgccgatgccgcgcggcccggcgacgcgagcggccacggcacgctcgaacgcctgctcgatccgagcgcgagcgatgcgctgcaacagctggcccgcgcctgcgaggtcacgccgagcacggtgatccaggccgcgtgggcgctgctgctcggccgcgcgagcggccgcgacgacgtggtgttcggcacgaccgtctccggccggcccgccggcctgcgcggcgtcgagcagatggtcgggctgttcgtcaacgcgctgccgacgcgcgtggccatcgacccgacgctcacgctcggcgactggttccggcgcctgcatcggcagcacgtcgaggccgaggcgtatgcatacacgccgctgcacgtgattccgggctggagcggcgtcgcgcccggcgcgccgctgttcgagagcctcgtggtgttcgagaactatccggcgcacgcggcggcgaaccgctatcgcgagcagctgggcgtggccggcgtcgaggtcgtcgagcagaccaattacccgctgaccgtcgtcgcgattccgggcgagcgcctgtgcctgcgtgtgcacttcgatcggcagcgcctcgcggaagcgtcggcggcgcgcctgctcaagatgctcgcgacgctgctcgaccagttcctgcgcggcggcgcggcgctgcgcgtcgggcaggtctcgctgctcggcgacgaggcgggccgcgcgctggtcgcgcagtggaacgcggcggcgcggcccgccgccgacccggcgcggctgtgcctgcaccgacgcttcgaggcccaggcgcggatgcggccggatgcgatcgcggtgcagtacgacggccgctcgctcagctacgccgaactcgagcgtcgcgcgaaccggctcgcgtggcggctcgatgcggcgggcgtgcgcggcaacgtgccggtcgcgctcgcgttcgagcgcggcatcgacagcatcgtcgcgatgctggccgtgctgaaggcgggcgcgttctatgtcccgctggatctcgaccatccgccggaacggctcgcgtggatgctcgacgacatgcaggccggcgtgctgatctgcgacgacgcgcggcgcgagcgcttcgatggcttcggcggcgcgcggctcgtgatcgatgccgatgtggaggcggccgccgtggacacggccgccgtggagacggccgacgtccgcgccgaagcgccgccgccgcgcgatgcctcgcccaccgacctctgctatgtgatctacacgtcgggttcgaccgggcagccgaagggcgtgtgcatcgagcatcgcaatgtcgaccacctgttcgcggcgacgcggcagacctacggcatcgggccgacggacgtctggacccagttccactcctatgcgttcgacttctcggtgtgggaaatctggggcgcgctgctgcacggcgggcggctcgaagtggtgccctacggctgctcgcgcacgccgaacgcctttctcgcgctgctcgcgcgcgcgggcgtgacgatgctgagccagaccccgaccgcgttcaagcagctgctgcgcgcgctggacgacgcgcggcagccgctgccggcgagcctgcgctacgtgttcttcggcggcgaagcgacgattccgagccagttcgccgcgtgcctgaacgatgcgcacggcgtcacgctcgtcaacctgtacgggatcaccgagaccacggtccatgtgaccgagcgcgtgctcggcccgggcgacgcgcaatcgtcgcgcagcccggtcggccggcccttgcccggctatcgcgtctacctgctcgacgcggccgggcatcccgtgccgccgggcgtgccgggcgagatccatgtcggcggagaaggcgtcgcgcgcggctatcacaaccgccccgaactcgatcgcgcgcgcttcgtcgccgatccgttcgcgcccggcgcgcgcctgtatcgcagcggcgatctcggccgcttcgatgcgcacggcgaactcgactatctgggccgcatcgacgatcaggtcaagatccgcggcttccggatcgagctgggcgaagtggaggcggcgctggcccggcacccggaagtcgcccacgcggcggtcatggtcgacgacgcgaccgtcgatggccatgcgcagctggtggggttcatggtgttgcgcgacaccgggcgcgtgtccggcgcggcgctgcgcgactggctcgcgcagcgcctgccgccgcacgcgctgcccgcgcgcctgatcgagctcgatgcgattccgctcacgaccaacggcaagctcgatcgccgccggctcgtcgacgcgctggcggccgacggcgacgcggcgcgaccgcacgtcgcgccgcgcaatgcggtcgagcagaccctggccgatgtcttcgcgtcggtgctcaagcgctcgacggtcggcgtcacggacaatttcttcgagctgggcggcgactcgatcctgagcatccagatcctgtcggccgcgcacaaggtcagcatcgatttctcgctcgacgacctgatgcagtcgctgaccatcgagcggctcgcgccgcgcgtgcggcccgtcggggcggcggcgccggccccggccgccccggccgcgcgcgcgacgccgtcgcgcgaccagccgtacgacgacgcgtatccgctcagcgcgatgcagatggcgatgctcgccaacgagatgcggcacggccacgactccgcctatcacaacgtcaacgatcagcgcctggccctgccgttcgacgccgccgcgctcgaagcggcgctgcgcggcgcgttcgagcgccatccggccttgcgcaccgcgttcgacctggccgccgacgacgagccgctgcagtacgtgcatcgccgcgtgccgttgccgctgaccgtgcgcgactggcgcggcctcgatcccgtgcagcaggacacgcggatccgcgactggcgcgcggccgagcagcgcctgcggttcgatgtcgcgcgtccgccgctgatccgcttcaccgtgcatcgtctgagcgacgacacgatgcatatcggcgtgaccaagcatcacgcgatcctcgacggctggagcttcaatctgctgctgtccgaactgatctccgactacgcggcgcggctggccggccgggcgctgaccctcaccgcgcccgcgagccggtttcgcgagttcgtcgagcaggaacgcgcggcggtcggctccgacgcgctgcgcgcctggtggcgcgcgcggctccaggcgctgcccgtcacgcggctcacgcacgagccggacggcgatgcgacgccgatggcggtgccgatctcggccgagcagtcggcgcgcctcgaagcgctcgcggtgcgcgcgggcgcgtccgtgaagagcgtgctgctgacggtgcatctgctcgcgctgtcgcgcatcacgggcatgcatgcggtgacgagcggcgtcgtgttcaacgggcgcagcgagggcgtcgacggcgaccgcgtgctgggcctgttcctgaacagcctgccgctcagcttcgacctgacggccggcacccgcgacgccgtcgcgctggtgcgcgcggtgcaggcgaccgagatggaaatcttcagtcgccggcgctacccgctgatcgaactgcatcggcagatcggcacggtgttcgacgtgctgttcaacttcacgcacttccgcgcgctcgaggaggccgtgcgcgacatcgacgtgtccgaaggctacgcgaccgacatgacgaacgtgccgctcgtcgtgcaaagcagcgtcgacggccggcacggcgtgctgcggatcacgctggtgccgtcgcggcggtatttctcggcggggaccgtcggccgcttcgtgggccactacacggacgcgatgcgcatgatgctcggcgaatccgggcccgccgggcaggcggccgatatgacgaacgcgggcgacgccgcccgccgcggcgaggcgtcggcgcccgcgggatcggccgggggcggggtgtccgcggccaatgcgcccgccgtcgcgcgaccgcatggcgcggcgctgcggcgcgagctgcgcgcgctgtgggcgggcgtgctcaagcgcgaggtgccgtccgacacggcagatttcggcgcgctgggcggcgattcgctgctgatgctgcggatctgctcgcgggcgggccgggcgttcgggctcgacgcgcaggtggtggcccgcctgctgacggcgcagacggtggccgagcaggcgcgcatgatcgagacggacggcgcgggcggggacggggcccaggtcggcgcgctcgtcgcgctgtccgcgcccggcgatgcgccgccgttgttcttcgcgcccggcgcgggcgggcaggcgtcgtatctgcgcgcgctcgcggccgaactgccggatgccttcgcggtctggggcatggcgctgcccgggcccgacgaaggcggctccggcgcgagccgcgtcgaatcgatcgcggcggcgctgctcgccgacatccggcgcgtgcagccgagcggcccgtaccgcctcggcggccattcgttcggcggctgggtcgccttcgagatcgcgcggcaattgcgcgaacagggcgaggcggtggactgggtcgcggtcgtcgacagcctgccgccgggcctcacgacgcagcagtcgctcaagtggaactggtcgggcgggcgctgggtcgcggagatcggcaacagcttcgcgcgcctcgccgatgccgcgctcgtcttcgacgaaggcgaattcgacgggctcgacgacgcgcggcaggtcgagcgtctgcgcgcgcgcctgatcgaggcgggcatcgtgccggacgaactcggcctgtccgaattcgcggcgcgcgtgcgcgccttcatcgcgcattcgctgaccgactacgccccggcgacgcgctacgcgggcgcgctgcgcgtgatcgtcgccgccgacgacccggatcgcgacgcgggggcgacggagcgcgacgcgcgcgtcgacggatggcgcgcggcggccgcgggcgaggtggcggcgatccgcttgcccggcgatcacgtcggcatcatgcgcgcgccgttcgtggccgggctcgccgccgccctgcgcgcgtggcccgagccgcgcgccgtttcagtcatggaaatcgagggagaacaa

SEQ ID NO: 38 - DNA, 6516 bp, Burkholderia rinojensis
atgctacgaattcgtctggagctaccaccatctgctgctcgacggctggtcggtgcagatcgtgctcggggaagcgctggcctgctacgacgcgtaccggcgcggcgacgcgccggccttgccgccgccccagccgtacagcgcgttcctgcgctggctcgacgcgcaggacggcgcggcggccgaggcgttctggcgcgcgcgcctgggcgacgtccgcgcggccacgcccctgccgctcgccgatgccgcgcggcccggcgacgcgagcggccacggcacgctcgaacgcctgctcgatccgagcgcgagcgatgcgctgcaacagctggcccgcgcctgcgaggtcacgccgagcacggtgatccaggccgcgtgggcgctgctgctcggccgcgcgagcggccgcgacgacgtggtgttcggcacgaccgtctccggccggcccgccggcctgcgcggcgtcgagcagatggtcgggctgttcgtcaacgcgctgccgacgcgcgtggccatcgacccgacgctcacgctcggcgactggttccggcgcctgcatcggcagcacgtcgaggccgaggcgtatgcatacacgccgctgcacgtgattccgggctggagcggcgtcgcgcccggcgcgccgctgttcgagagcctcgtggtgttcgagaactatccggcgcacgcggcggcgaaccgctatcgcgagcagctgggcgtggccggcgtcgaggtcgtcgagcagaccaattacccgctgaccgtcgtcgcgattccgggcgagcgcctgtgcctgcgtgtgcacttcgatcggcagcgcctcgcggaagcgtcggcggcgcgcctgctcaagatgctcgcgacgctgctcgaccagttcctgcgcggcggcgcggcgctgcgcgtcgggcaggtctcgctgctcggcgacgaggcgggccgcgcgctggtcgcgcagtggaacgcggcggcgcggcccgccgccgacccggcgcggctgtgcctgcaccgacgcttcgaggcccaggcgcggatgcggccggatgcgatcgcggtgcagtacgacggccgctcgctcagctacgccgaactcgagcgtcgcgcgaaccggctcgcgtggcggctcgatgcggcgggcgtgcgcggcaacgtgccggtcgcgctcgcgttcgagcgcggcatcgacagcatcgtcgcgatgctggccgtgctgaaggcgggcgcgttctatgtcccgctggatctcgaccatccgccggaacggctcgcgtggatgctcgacgacatgcaggccggcgtgctgatctgcgacgacgcgcggcgcgagcgcttcgatggcttcggcggcgcgcggctcgtgatcgatgccgatgtggaggcggccgccgtggacacggccgccgtggagacggccgacgtccgcgccgaagcgccgccgccgcgcgatgcctcgcccaccgacctctgctatgtgatctacacgtcgggttcgaccgggcagccgaagggcgtgtgcatcgagcatcgcaatgtcgaccacctgttcgcggcgacgcggcagacctacggcatcgggccgacggacgtctggacccagttccactcctatgcgttcgacttctcggtgtgggaaatctggggcgcgctgctgcacggcgggcggctcgaagtggtgccctacggctgctcgcgcacgccgaacgcctttctcgcgctgctcgcgcgcgcgggcgtgacgatgctgagccagaccccgaccgcgttcaagcagctgctgcgcgcgctggacgacgcgcggcagccgctgccggcgagcctgcgctacgtgttcttcggcggcgaagcgacgattccgagccagttcgccgcgtgcctgaacgatgcgcacggcgtcacgctcgtcaacctgtacgggatcaccgagaccacggtccatgtgaccgagcgcgtgctcggcccgggcgacgcgcaatcgtcgcgcagcccggtcggccggcccttgcccggctatcgcgtctacctgctcgacgcggccgggcatcccgtgccgccgggcgtgccgggcgagatccatgtcggcggagaaggcgtcgcgcgcggctatcacaaccgccccgaactcgatcgcgcgcgcttcgtcgccgatccgttcgcgcccggcgcgcgcctgtatcgcagcggcgatctcggccgcttcgatgcgcacggcgaactcgactatctgggccgcatcgacgatcaggtcaagatccgcggcttccggatcgagctgggcgaagtggaggcggcgctggcccggcacccggaagtcgcccacgcggcggtcatggtcgacgacgcgaccgtcgatggccatgcgcagctggtggggttcatggtgttgcgcgacaccgggcgcgtgtccggcgcggcgctgcgcgactggctcgcgcagcgcctgccgccgcacgcgctgcccgcgcgcctgatcgagctcgatgcgattccgctcacgaccaacggcaagctcgatcgccgccggctcgtcgacgcgctggcggccgacggcgacgcggcgcgaccgcacgtcgcgccgcgcaatgcggtcgagcagaccctggccgatgtcttcgcgtcggtgctcaagcgctcgacggtcggcgtcacggacaatttcttcgagctgggcggcgactcgatcctgagcatccagatcctgtcggccgcgcacaaggtcagcatcgatttctcgctcgacgacctgatgcagtcgctgaccatcgagcggctcgcgccgcgcgtgcggcccgtcggggcggcggcgccggccccggccgccccggccgcgcgcgcgacgccgtcgcgcgaccagccgtacgacgacgcgtatccgctcagcgcgatgcagatggcgatgctcgccaacgagatgcggcacggccacgactccgcctatcacaacgtcaacgatcagcgcctggccctgccgttcgacgccgccgcgctcgaagcggcgctgcgcggcgcgttcgagcgccatccggccttgcgcaccgcgttcgacctggccgccgacgacgagccgctgcagtacgtgcatcgccgcgtgccgttgccgctgaccgtgcgcgactggcgcggcctcgatcccgtgcagcaggacacgcggatccgcgactggcgcgcggccgagcagcgcctgcggttcgatgtcgcgcgtccgccgctgatccgcttcaccgtgcatcgtctgagcgacgacacgatgcatatcggcgtgaccaagcatcacgcgatcctcgacggctggagcttcaatctgctgctgtccgaactgatctccgactacgcggcgcggctggccggccgggcgctgaccctcaccgcgcccgcgagccggtttcgcgagttcgtcgagcaggaacgcgcggcggtcggctccgacgcgctgcgcgcctggtggcgcgcgcggctccaggcgctgcccgtcacgcggctcacgcacgagccggacggcgatgcgacgccgatggcggtgccgatctcggccgagcagtcggcgcgcctcgaagcgctcgcggtgcgcgcgggcgcgtccgtgaagagcgtgctgctgacggtgcatctgctcgcgctgtcgcgcatcacgggcatgcatgcggtgacgagcggcgtcgtgttcaacgggcgcagcgagggcgtcgacggcgaccgcgtgctgggcctgttcctgaacagcctgccgctcagcttcgacctgacggccggcacccgcgacgccgtcgcgctggtgcgcgcggtgcaggcgaccgagatggaaatcttcagtcgccggcgctacccgctgatcgaactgcatcggcagatcggcacggtgttcgacgtgctgttcaacttcacgcacttccgcgcgctcgaggaggccgtgcgcgacatcgacgtgtccgaaggctacgcgaccgacatgacgaacgtgccgctcgtcgtgcaaagcagcgtcgacggccggcacggcgtgctgcggatcacgctggtgccgtcgcggcggtatttctcggcggggaccgtcggccgcttcgtgggccactacacggacgcgatgcgcatgatgctcggcgaatccgggcccgccgggcaggcggccgatatgacgaacgcgggcgacgccgcccgccgcggcgaggcgtcggcgcccgcgggatcggccgggggcggggtgtccgcggccaatgcgcccgccgtcgcgcgaccgcatggcgcggcgctgcggcgcgagctgcgcgcgctgtgggcgggcgtgctcaagcgcgaggtgccgtccgacacggcagatttcggcgcgctgggcggcgattcgctgctgatgctgcggatctgctcgcgggcgggccgggcgttcgggctcgacgcgcaggtggtggcccgcctgctgacggcgcagacggtggccgagcaggcgcgcatgatcgagacggacggcgcgggcggggacggggcccaggtcggcgcgctcgtcgcgctgtccgcgcccggcgatgcgccgccgttgttcttcgcgcccggcgcgggcgggcaggcgtcgtatctgcgcgcgctcgcggccgaactgccggatgccttcgcggtctggggcatggcgctgcccgggcccgacgaaggcggctccggcgcgagccgcgtcgaatcgatcgcggcggcgctgctcgccgacatccggcgcgtgcagccgagcggcccgtaccgcctcggcggccattcgttcggcggctgggtcgccttcgagatcgcgcggcaattgcgcgaacagggcgaggcggtggactgggtcgcggtcgtcgacagcctgccgccgggcctcacgacgcagcagtcgctcaagtggaactggtcgggcgggcgctgggtcgcggagatcggcaacagcttcgcgcgcctcgccgatgccgcgctcgtcttcgacgaaggcgaattcgacgggctcgacgacgcgcggcaggtcgagcgtctgcgcgcgcgcctgatcgaggcgggcatcgtgccggacgaactcggcctgtccgaattcgcggcgcgcgtgcgcgccttcatcgcgcattcgctgaccgactacgccccggcgacgcgctacgcgggcgcgctgcgcgtgatcgtcgccgccgacgacccggatcgcgacgcgggggcgacggagcgcgacgcgcgcgtcgacggatggcgcgcggcggccgcgggcgaggtggcggcgatccgcttgcccggcgatcacgtcggcatcatgcgcgcgccgttcgtggccgggctcgccgccgccctgcgcgcgtggcccgagccgcgcgccgtttcagtcatggaaatcgagggagaacaatgaatacacgagtcacggcattcgccgctgtcgaggcggcgctcgcggaaccggaagcggcgctggcgaacggcgatttcgaggcggtcgaaggcctgatgagcgacatccgcgcggccaaccggaggcgcggcctctggctgccgcaggtgtcgcgcgcggacggcggcctgggcttgaacctgctcgaactggtcgaggtgggcgaactgctgggccgctcgccgctcggccattacgcggtcaactatcaggcgcccgacgccggcaacatcgacgtgctgctcgaatacgcgacccccgcgcagcgccagcgctggctggagccgctgctgcgcggcgaggtgcgcagctgcttcgcggcgaccgagcccgaatccgcggggtcgaatccgtcgtcgctgaagacgacggcggtgcggcgcgacggcgcgtggcatctgagcggccgcaagtggttcgcgtccggcgccgatcgcgcgggattcgcgatcgtgctggccgtcaccgacgaggccgcgccgctgcacgcgcgcaccagcaccttcatcgtgccggccgacgcacccgggttccgccacgtccgcaacctgcgcgtgatgggcgacgagggctacggctgggcgagccacggcgagctggcgctcgatgcatgccgggtcggcgaggacgcgatgctcggcaagcccggcgaaggcttcgtcgtgctgcaggcgcggctcgcgaccgggcggctgcatcattgcgcgcgctggatcggcgtgtgcgagcgcgcgttcgcgatcatgtgccggcgcgcgtgccggcgcgaactcgcggcaggcgagctgctgtcgtcgcgccagaccgtgcagaactggatcgccgagagccgcgcatcgatcgacgccgcgcggctgctcgtggcccaggcggcggcgcgcctgcagaatcgccacgagcgcgcgcagatcgacatctcgatcgcgaagttcttcgtggccggcgtgacgcagaccgtcctcgatcacgcgctgcaggtgcagggcgcgctgggcgtgagcggcgacacgatcctcaacgtgctctggcggcacgaacgcgcggggcgcatctacgacggtccggacgaagtccacaaggcgctggtcgcgcgccatgcgctcgccggcttccggcgggaggcgtca

SEQ ID NO: 39 - DNA, 1479 bp, Burkholderia rinojensis
atgccgggtcggcgaggacgcgatgctcggcaagcccggcgaaggcttcgtcgtgctgcaggcgcggctcgcgaccgggcggctgcatcattgcgcgcgctggatcggcgtgtgcgagcgcgcgttcgcgatcatgtgccggcgcgcgtgccggcgcgaactcgcggcaggcgagctgctgtcgtcgcgccagaccgtgcagaactggatcgccgagagccgcgcatcgatcgacgccgcgcggctgctcgtggcccaggcggcggcgcgcctgcagaatcgccacgagcgcgcgcagatcgacatctcgatcgcgaagttcttcgtggccggcgtgacgcagaccgtcctcgatcacgcgctgcaggtgcagggcgcgctgggcgtgagcggcgacacgatcctcaacgtgctctggcggcacgaacgcgcggggcgcatctacgacggtccggacgaagtccacaaggcgctggtcgcgcgccatgcgctcgccggcttccggcgggaggcgtcatgaacgcgcggatcgcggaacaggcgatgacggcgctcggccgcccgggcgccgccgcgcgcgcgacgcgcatcggcggcgggcgggccagcgaagtgttccgggtgcagggcggcgaacgcgacgtcatcgcgtactggctgcccgaaggcggcgtgcgggaggcgcagcgccgcttcgccgtgctggaccggctggccggccagttccgtctcgccccgaagccgctggcggtgggcgacgcgggcgccgccgcgctgctgctggtcgaacggctcggcggcgtcgcgccggccgcgtgcgggccgctcgggcccggcaccgtgcgccgcctcgcggaacagttcgtcgcgacgctcgcggcgctgcacgcgctcgagatcgcgccggccgaccggccgcccgactacctgcgccgcatcctgggcgagtggcggcggcgctggaacgcggaggccgcgggcgcggccgtcgacgccgatttcagggccgtggcgaactggctggcggagcggatcccggacgccgcgcccgccgcattcctgcacaacgactacaagctcgacaacatcctcgtcgatccgggcgatcccgcgcgcgtggtgggcgtcgtggactgggagctggcggccgtcggccacccgctcgccgatctcggcgcggcgctcgcgtactggatcgagcccggcgattcgtcgctgctgcggctcgacgcgcccgggccgagctgcgcgccgggcgcgccgacgcgcgcggcgctggtcgagctgtacgcggccgccgccgggcgcgacgtggcggaacccgcctactggtacgcgtacggcctgctgcggctcgccgtgatcacgcagcagctggcgctgcggcgtcgcgacgaagggcagcgcgtgccgcgcagcgcgctgatcgtgcgctggctgctcgatcgcgcggcgcaggcgtgcggaagcggccggctg

SEQ ID NO: 40 - DNA, 903 bp, Burkholderia rinojensis
atgaacactgaagcatccacgacgcccatcgacgtcatcgtgatcggcggcagtcacgccgggcaatccgccgcgctgcagatcgcgcgcgcgcgccggcgcgtgctggtcatcgacgcgggcgcgcgccgcaaccgcttcgccgcgcattcgcacggcgtgatcggccaggacggccgttcgcccgacgcgatcgcggcggacggccgggcgcagttgctcgcctatccgaatgcgcaatggcgggcggataccgtcgtgcgcgcggagcggaccgacaccggctatgcgctccactgcgcctcgggacaacgctacgacgcgcgccacctggtgctcgcgttcggcgtggtggacgaattgccggacctggcggggctgcgcgaacggtgggggcaaagcgtattccactgcccgtactgccacggctatgaactcgaccagggccgcatcggcgtgctcgggagcgggccgctgtcgtatctgtcggcgatgctgatgcccgagtggggcgagaccgtgttcctgacggacggcagcttcgagcccgacgaggcgcagcgcgaggcgctcgcgcaacggggcgtcgagatcgtgcccgagcgggtcgcgcgcatcgtcgagcgcgcgagcgtcgaactggtcgacggacgccgcctcgtgttcgacggactgttcacgatgaatcgcatgcgcctgtcgagcgccgtcgcggaacagctgggctgcgtgatcgaggcggggccgctcggaccttacgtgcgcaccgacgatgcgatggagacctcggtgccgggcgtgttcgcgtgcggcgacatcacgcaccggggcggcaccgtggcgctcgcgatcggcaacggcgcgctcgcgggcattgccgcgcatcgcaagctggtgttcgcg

SEQ ID NO: 41 - DNA, 1101 bp, Burkholderia rinojensis
atgcgatggagacctcggtgccgggcgtgttcgcgtgcggcgacatcacgcaccggggcggcaccgtggcgctcgcgatcggcaacggcgcgctcgcgggcattgccgcgcatcgcaagctggtgttcgcgtgacgcgcctgcgcgtcgcgccggggcgctcccttttctctttatcggaaaccgatctgtgagttggcaaaacgtatgtttctcgtggctgttgcgccggacggccaaatccctgacccgcaagccgaccctgacggcccaggacatgcgcgcgcgcagcgcgaagtgggcgcgcggcgaggcgaagccgccgcgcggctggcgcgtgcgccagctcgacgcgcaggccgtgcgcggcgagtggatcgagccggacggcgacgcgccgcgcgatgcgtccgggcgggtcatcctgtacctgcacggcggcggctattgcttctgttccccgctgacgcaccggaccgtggccgccgcgctcgcgcaggaagcggatgcgcgcgcgttctcgctcgattaccgactcgcgccggagcatccgtttcccgccgccgtcgacgatacgctggcggcctatcgcgcgctcctggacgacggcgtgaggccggaccggatcgtggtcgcgggcgattcgtcgggaggcgggctggcgctggcgctgctgctgtcgctgcgcgacgcgggcgagccgctgccggccggcgcggtgctgttctcgccgtggacggatctggcggcgacgggggcgtcgctcgccgcgaacgatgcgtccgacgtgatgctgacggctgtcgcggtgaagaatttttcccgctactacctcggcgacaccgccgccgatcatccggtcgcctcgccgctctacggcgagtatgcgggcttgcccgacctgttcattcaggcgagcgattccgaggtgctgctggacgacgccgcgcgcgtggccaggaaggcgagcgaagccggcgtcggagtggacttcaaggtgtggcggcggctgccgcatgcgtgggccacgttgacgcccatgctgcccgaggcgagggcggcgatccgggaagccggcggattcatccgcaaggtggcggca

SEQ ID NO: 42 - DNA, 1695 bp, Burkholderia rinojensis
atgtttctcgtggctgttgcgccggacggccaaatccctgacccgcaagccgaccctgacggcccaggacatgcgcgcgcgcagcgcgaagtgggcgcgcggcgaggcgaagccgccgcgcggctggcgcgtgcgccagctcgacgcgcaggccgtgcgcggcgagtggatcgagccggacggcgacgcgccgcgcgatgcgtccgggcgggtcatcctgtacctgcacggcggcggctattgcttctgttccccgctgacgcaccggaccgtggccgccgcgctcgcgcaggaagcggatgcgcgcgcgttctcgctcgattaccgactcgcgccggagcatccgtttcccgccgccgtcgacgatacgctggcggcctatcgcgcgctcctggacgacggcgtgaggccggaccggatcgtggtcgcgggcgattcgtcgggaggcgggctggcgctggcgctgctgctgtcgctgcgcgacgcgggcgagccgctgccggccggcgcggtgctgttctcgccgtggacggatctggcggcgacgggggcgtcgctcgccgcgaacgatgcgtccgacgtgatgctgacggctgtcgcggtgaagaatttttcccgctactacctcggcgacaccgccgccgatcatccggtcgcctcgccgctctacggcgagtatgcgggcttgcccgacctgttcattcaggcgagcgattccgaggtgctgctggacgacgccgcgcgcgtggccaggaaggcgagcgaagccggcgtcggagtggacttcaaggtgtggcggcggctgccgcatgcgtgggccacgttgacgcccatgctgcccgaggcgagggcggcgatccgggaagccggcggattcatccgcaaggtggcggcatgagctacgaatggacgccggcgcgcggcagcacgtgggtggatgccccgccggccggcccgcatgcgacgctgcggctgttctgctttccctacgcgggcgggagcgcgacggtgtttcggggctgggcggaacgcttcccggccacggtcgatgtgcggccgatgcatccgccggggcgcgggcggcgctttcacgatgcgctgctgtaccgcgtggatcagctggccgacgaggcgacggccgcgatcgcgccgctgctcgaccggccttatgcgctgttcgggcacagcatgggcgcgagcgtggcgttcgaggtggcccagtgcctgagggaacgacacctgccgcagccggcgtgcctgatcgtggccgggcggggcgcgccgcatctggacgaccccgatccgccgattcacggcctgcccgatcatcgcttcctggaagaggtcatgcggatgaacggcacgccggacgacgtgatgacgcaacccgacatcgtcaagatcattctgccggtcctgcgcgcggatttcgaggccatcgagatgtaccggcccgcgccgaggccgccgctcgcttgccggatcgtcgcgctgggcgggcgggacgaagcggggagcgtcgcggcggcgtcgtcgtggcgcgactacggcacgggcgggtttcgcgaggaaatcgtgcccggcgaccatttcttcctgcgcgggcgggccgaccgggtgttcgagatcctgaacgaggaactggaacggatcggcgcgccggggcggaaccttccgcgccgcttcgacgcgcgc

SEQ ID NO: 43 - DNA, 300 bp, Burkholderia rinojensis
atgaaatgtccggcctgcaagacccccgacctgttgatgaccgagcgccaggccatcgagatcgactactgtcccgcctgccgaggcgtgtggctcgaccgcggcgaactggacaagctgatcgcccgcgccgatgacgcgcggcccgccgggcgcgacgcggcgcgcgcgccctcgccctcgccctcggccgcgcgccacgacgactggggccagcgcggaagcgcgccgcgcgacggcggccatgcgcattccggttaccgcaagaagaaatcgctgttcgacctgttcgacttcgat

SEQ ID NO: 44 - DNA, 1200 bp, Burkholderia rinojensis
atgacgaagacagaggagactatgaaaccgaatgacctgcagccgtccaactggccgctttcccagcgcgcgcgcaagctgaccagctccgcgatccgcgagatcctgaaggtgacggaacgtcccgaggtgatctcgttcgcgggcggcctgccctcgcccgcgaccttcccggccgaacggatgcgcgaggccgccgatcgggtgctgcgcgacgcgccgggcgcggcgctccagtacagcgcgacggaaggtttcctgccgctgcgcgaatggatcgccgagcgctaccgggtgcgggtgtcgcaggtgctgatcacgaccggctcgcagcaggcgctcgacctgctcggcaaggtgctgatcgatccggacagcccggtgttggtggaaacccccacctacctcggcgcgctgcaatcgttctcgctgtacgagccgcgctatgtgcagctgccaaccgacgacgccggcctgctgcccgaccagttcacgcccgagctgacgcgcggcgcgcgcctgttgtacgcgcaaccgaatttccagaacccgaccggccgccgcacgcccgtcgagcgccgccgggcgctggccgcgttcgcgcagtcgagcccgttcccggtgctggaggacgatccgtacggcgcgctcaactacgcgggcgagccgctgccgagcatgctgtcgatggcgcccgaccacatcgtccacctcggcacgttctcgaaggtgctcgcgcccggcctgcggatcggctacatcatcgcgcccgaggaactgcacttcaagctcgtgcaggcgaagcaggcgaccgacctgcacacgccgtcgctcacgcagcggatcgcgtacgaagtgatccgcgacggcttcctcgacacccacatcccgaccatccgccagctctacagcgcgcaatgcgaggccatgctcgcgtcgctcgcgcgccacatgccggaaggcgtgagctggaaccgccccgaaggcggcatgttcatctgggtcaagctgcccgccgggctcgacagcatgcagctgctcgacgcctcgatcgcccgcaacgttgcgttcgtgccgggcgcgccgttcttcgcggacgacgcgcaggccaacacgctgcgcctgtcgttcgtcacggtgccgcccgagaagatcgaggccggcatcgcccagctcggcgcgctgatccgcgaacgcctg

SEQ ID NO: 45 - DNA, 5139 bp, Chromobacterium haemolyticum
atgggcgcgcgcccggcatacccggagcagttgtcgatacatggaggtcatgcaatgtattcctcatccgatgtcgcatctcggcggacgcccgccgccgacaagttcggccctcatcaagctttttcgcatcgcgaagcgcctagcatcgcccggcagttgctgtggcgggcggaggcgagtcccgagcgtctcgcctacgcgtcggccgatccggagaaagcgctcgcgctaagctatgcggcgctgtgcgaacgcgcgtccggcatcgccgcgcgtctggcgcaagcgaccgaggccggcgagcgcgtgatgctggtctatcaggagccgctcgatttccttccggccttcttcggctgctgcctggccggcgtgatcccggtgccggtggcgccgcgtcacggccgcgacacgatggcggcgatcgcccaggactgcggcgccgccatcgcgctgagcgcggaggcgcgggacgccttgccgggcctgcgctggatgcgcaccgacgaggccgagcgcgccacgccctttttgcgcgcggcgaaggacgccagtccggcgctgctgcagtacacctcgggttcgacgcgcacgccgcagggcgtggtggtcacgcaaaccgggctgtgggcgacgatagacgatcttgaccgcggcgcgatgcacgacgcggacagcgcgatgatcagctggctgccgtacttccacgacatgggcctggtgtacggcattctcacccccttgcaatgcggctttcccgcctatctgatggcgccggagaaattcgtcgcccagcccatgtcctggctgcgcgcgatagccgcgcggcgcggcacccacaccgccgcgccgaatttcgcctacgccttgtgcgcggaccgcgcgggcgatctcgcgccgggcaccgacttgtcgtccttgcgttatgcgctgaacggcgcggagccggtgcgctgtgacacggtgcgccgcttcgaggcggccttcgcgccgtttgggctgcgttcttcggtggtggtgccgggctacggcctggccgaggcgaccttgaaggtgaccgccggccgttgcggcgagggcacgcgcggcgtgcgtttcgcgcgggaggcgctggcgcgcggccgcgtgtcgccgcagacggacggcgtcgaattggcggcctgcggcgtcagcctgatcgatacgcgcgtccgcatcgtggacccggacacgcgcgcgccgtgcgcgccggacgccgtcggcgaaatatgggtgaccgggagcacggtcgccgacagttattggcgccgcccggaggagtcgcgcgagatcttcggcgcgcggctggccgacggcgacagcgcatggctgagaaccggcgatctgggctttctgcacgagggcgatctgttcgtcaccagccgcttgaaggatttgatcatcgtcggcggccggaatgtctacagccacgatctggaagacaccgtgtcggcctgccatccgtcgattcggaaggggcgcgccttcgccgccgccgtcgacggcgaggacggcgaagggattctgatcggcgccgaggtgcgcggcggctgcggggaggcggaggcccgtgacatcctgccggtgattcgcgcggcgctggcgcgggagcacggcgtggcgccggcgcgcatcgcgctgctgtggcgcggcagcatcctgcgcacctccagcggcaagacccggcgcggcgccacccgcgacgcgctgctgcgcggcgaactgcgcatcgtcgccgacgacgtggccgaggcggccgacgacgcgattctggccgagatcgcgcgcttcgtgcccggcgcggccgcgtcgcccgacgccaggctgatcgatctggggctggattcgctgtcggccgcgcggcttgccgccgccgcgcgcgcgcgtcatgacgtggagttgtcgttcgcggcgctgttcgcgctttccgcccggcaactgcggcgcgaaatcgtcgacgccccgcgcctggacgccgcggcgccggccgcggctcgccgctatgcggcgggggaggcgttcgaactgtccgagatgcagcaggcttactggataggccagcagggcggggtgccgctgggcagcgtgtccccgcatatccgcgtggatttcgagatagatgccgcgcgcgcgccggaactgggccggcgcctcgcgcggctggtcgcccgccacccgtccttgcggatgacggtgggcgcggacgggcgcggcgcgttcgacgcgctggcctacgaccccttgctgccgccgcaggatttgcgcgggctggacgcggcggaggcggcggaacggctggaggcgacgcgcgagagcctggccgagcgcgacggcccgcccgtgctcgccgtcgtctcccgtctgaccgagagcacggctatcctgcacctgcggctcagcctgctggccggcgatctgcgcagcttcctgcaactgatggccgagctggcgcgcgacgcggccgaggaggcccccgcgcaatgcatcacgccgatgacgccgccggcggcgaccgaggcacagcgcgaggcctggctgcgccgggtcgaagccatcgcgccggcgccggagttgccgatgaagatggcgctggccgaggtggccgagccgcgcttcgccaaccgccgccgggagctgcccgccgccttgtccgcggcgctgacggcgcgggcgcaggcgctcggggtcacgctgacttcgctgtgcatcgccgccttcgccgacacgctgcggctgtggacggcggcgcacgccttcacgctcaacgtgacttgcaacacgcgggcggagcaggcggggctggcgataggcgattacaccagcaacaccttgctgtcgctgagcgagcgtcacccctcgttcgccgccttcgcccaagcggtgcagcggcaagtgtgggccgatctggacgcgccctggtgctccggcgtgtcgattctgcgcgagctgagccggcgcaacggcgcgcccgtgctgatgccggtggtgctgaccagcctgctgtccggcgacccggcggacgatctggccctgctggacggcgtcggccgcgtggtcgacatggccaatcccacgccccaggtgtccttgcacgccatcctgggccggcgcggcgacaggctggtgctgatgtgggagtccgtcgcgcagctgttccccgacggcatggtggacgcgatgttcgaggtcttcctcggcgcgctggaaacgatggcgacggacgccgcggccgtggagcggccgacgctggcccggctcgcgccgcagcaggcggcgcggcgcgcggcggtcaacgccaccgcggcggagcgcgcgccgcgccggctggaaacccccatcgtccggcaggcgcggatcgcgccggaggcggtggcggtcaggcagggcgagacgacgctgagctacggcgcgctgctgcgcgaggcggaagacatcgccggcgcgctgcggcaaagcggcgtggcgcgcggcgaggtggtggcggccatcgtcgcgccggggccgcgcgcggtggcggcgctgctgggcattgtgatggcgggcgcggtctatctgccgatagagccgtcttggccggccgcgcgcatagaagaactgctcggcgaggccggcgcccgtctcgcgctgctgagcgcggcaggcccggcgctgccggtgcccgcgctgcgtctggaccagccgctgccgcgcggcgacgcgggtccggccgcggacctcgaggccggcgacgcggcctatgtgatcttcacctcaggttccaccgggcggccgaagggcgtgctgatcgcgcacgaggccgcggcgaacaccatagacgacatcaaccaacgcttcgcggtcggcccggccgatcgcgcgctgtgcgtgtcctcgctggcctttgatttgtcggtctacgacatcttcggcctgctcgcggtcggcggcgaggtggtgttcccggcccgctcgcgcgatccggacgcgatggctcaggcgctcagcgacggcggggtcaccatctggaattccgtgccggcggtgctggaactgatgctggaagtgtccgcgccgcgttcgccgcatctgcgcctggcgctgatgagcggcgactggatcgcgcccggcctggccgggcggctgcgcgacgcgtttccggcgctgcggccgatcagcctgggcggggcgaccgaggtgtcgatctggtcggtggtgcatccgatcgcgcccgaggacgccgtgctggcgtcgattccctacggccggccgctgtccaaccagcaatgcttcgtgcgcgcgcccgacggccgggagcggccggacggcgtggtgggcgaattgctgctgggcggccgcggactcgcgctcgcctatctgggcaacgaggcggaaaccgagcgccgcttcttcatcgacgccgagggccggcggctctaccgcaccggcgatctcgcgcgctggcagccggacggcgagcttgaactgctgggacggatggacgggcaggtcaaggtgcagggctatcggatcgagctgggcgagatcgaggcggccgcgatgcgcgccggctgcctggcgcgcgccgtggcctcggtggcccggcgcaaggacgcgacggtgatccagctgcacgtggtggcgctgccggatcatcaaggcgacgtggtcgcggccgtgcgcactcaactggtgctgcatctgcccgcctatatgcagccgcatcacgtgatggtgctggacgccttgccgctgacggcgaacggcaaggtggaccgcgcgcgtctcgccgaactggcggccccggctcccgcgccggcgacgccggccgcggcggcgcggcgcgacgcttcgctggaggccacgatgctggccgccttcgccgaggtagtcggcgtcgagatagacccgcggcagggcttcttcgacgcgggcgccacctcgatgcacatcgtgaggctgcgcgcgctgctggcgtcgcgcggcgtcgcggtgcccccgctggtcgatttcttttcgctggccacgatacgggcgctcgccgagcgcgccgatacgggcgaggcggacctttccccaatgatggacgtcgacggcgcgcgcgcctatcgacagcgcgtacgcgcacgcaaggaggctttg

SEQ ID NO: 46 - DNA, 4665 bp, Chromobacterium haemolyticum
atgactgatgcaacacccgtagacgccgtagcgatcatcggcgcgagctgccgcctgcccggcgtcagcaccctggaacagttctggtcgatgatagccgacggccgggtcgcgattgaacgcttcggcgcggacgcggcgcgccgcgagggcgtgccggaaacggtgctggcccagcccggcttcgtcggcgccggcggtccgctggacggcgtcgatcaattcgacgcggcctatttcggcattccgccgtcgcaggcggcggcgatggacccgcagcagcggattttccttgaatgcgtgcacgaggcgctggagcgcgccggtcacggcgcggcgcgcggcgcgcgcgtcggcgtctgggccggctcggccagcgtcgattatctcgtcgaccacgtgcgcgaccggctggaccgcgcgtcgcccaaccgctatctgcagcaatgggtgggcgtggacaaggactatctggccacccaggtcgcctaccggctcgatttcggcggcccggccatcagcttgcagaccgcgtgctcgacttccctcgtcgccgtggttcaggcgatgcagggactgctgagcttccagtgcgacttcgcggtggcgggcggcgtcagcgtcgccttgccgcagcggcaaggccatgtgtacgaggagggcagcattctgtccgcggacggcgcctgccgtccgttcaccacggacagcagcggcaccgtcttcggcaacggcgcgggcgtggtggtgctgcgccgcctggaggacgcgctggccgacggcgaccccatcatggcggtgattcgcggcggcgcggtcaacaacgacggcgcggccaaggtgggcttcaccgcgcccggcgggcgcgggcagcaggacgtgatccgccaggcgctggcgctcagcgaggtggacggcgcgtcgataggctatgtggagacgcacggcaccggcacggcgatcggcgacgaggtggagctggcggcgctgggcgcggccctgggccagcgttccggcgccgacgcgcgctgcgcgctgggcacgctgaaggcgaacgtcggccatctgaacgcggcggcgggcgcttgcgggctgatcaaggccgcgctggcggtggcgcatgggcggattccggccgccgtcggcgcggaacgcgcgatagacgcgctgcgcggcgacgccggcttctacctgccaacggaaaccgcgccttgggacgcgccgcagcggcgcgccggggtcagctccttcggcatcggcggcaccaacgcccacgtgatcatagaagcggcgccgccgcgcgcgccgcgcacgccggacgtcgcgccgctcttgctgctgtcggcgcgcggcgaggccttgcccgcgttgtgcgcggactacgcggactttctcgacggccatcccgagctgaggatagaagacgtttgcctgacggcggcgctggggcggcggcattgggagcagcgcgcggcgttccgcgccgaatcccgcgaggccttgatcgccgcgctgcgcgccttcgccgccggcgagccgagcgcggagacgatcgcggcggaagtgccggcgcgcgcgccggagctgagcttcgcctttggcggcgccgaggatctggacgcggtattggcccgcgtgcagctgtggcaggcgagcggcgtcgtgccggccagcgtgtgcgcgacggggagcggcgtgttcgccgcggccttcgcggcgggcgcgctgagtcttgaggatgcgcggcagcgccgcgcggagcgcgccgtcgcgccgtcgctattgtggatcagcgcggcctcgggcctgccgctggacagcgcggaggcggtgcgtgaggaactggccggcgcgggcacggcgccaggcgcggcggacgccgccgaggcgctggaagcggccggcgcggaatgggtgctggacttcggcgacacggcgctgggcgcgggcgctgccggcatggtgtcgctcgatccggcctcgccggacgcgctggcgcggctgtggaccgcgggcctgacgctggagctgtcccagcattaccgcgacggcaaccgggtggcgctgccgacctatcccttccagcgccagcgtcactggatagaccgcgcgccgcgcttcctggcggcgggcgcgacgcccttccttggacggcgcaccgacgcgccggccttgggcgcgaccttcttcgacgccgaatggagcgtggccgccttgcccttcctgcaggatcacgtgatttacgacaaggtggtggtgtccggcgcggcgctcgcggtgatgatggccgacggcgcgcgcgcgctcaccggctcggacgactgcgtgctgagcgatctgcgcttcccggccgcgctggtgattccgtcgggcgcggcgcgcaaggtccagttgcaattggtgcgcgatggcgacggtttcgaagccacggtgttgacgctggagtccgccgacgtccatgcgacggccagggtggacgccggcgaggcgccgggcgccgcgccgttggagccggtgcgcggagaagcgatctccaccgagctgatggatagctggctgcgcgcgcgcagcgtggtgatgggaccgaccttccggcgtttgtcggacatcgtggtcggggacggcgacgcgtcttgcgatatgcgggacgacgccgacgacgccggctggttgctgcaccccggggtgctggattcggtgctgcaattggtggccgccgccgcgcggcccgagggcagcaaggctttcgtgccgacgcgcatcgcgcggctggcgctgcacgggcggaccggcgccgggatgcgctgtcacgcgtcggccgagcgggggcaggccagcctgttcgacgccggcaaggtgctgctcgaaatgaccggcctggagtcgcgcgaggtgacccgcaatgaattgctgcgcgtcgaaccgctgcgcgagggctatgcggtggaatggcgcgacgcggcgggcggcgaggccgccgcgctgccgccgtccatcgccatcctgagcggagcgggggatacggcggcagggctggcggcgatgctgcgcgacgaaggcaaggaggccgtcgtggtggcggcggtgaacgatattcccttcgacaaggcgggcctgatcgtcgattgccgcgggctggaggcgcgcggcgacgcgccggcgccggcggtttacgccggggcgctggaactgttcgccacggccgcgcggcgcgagcggccttgccgcatcgccttggcgctggcgccggacgcgccggcctcggcgccgctgcaggcgctgtcgcgcgcggtggcgatggaaacgccgcatctgcagacgctggcgctgcacgcgggcgacgcgcgggcgatccgccgcggcctggattacttcgagcgcgagaccgaagtcgcggtcaagggcgaggcggtcgccgcgccgcgcttcgacgagcgcgcgctgccgctcagagcggacctcgcgctctcggcggacgccacgtggctgatcacgggcgggctgggcgaactcggcctgcgcgtcgcgagctggctcgccgcgctgggcgcgcgcgccttggtgctgaccggccgccggccggccgacgccgcggccgaggcggcgctggccgcgctgcgccgcgacggcgtggaggtgaaggtgtggcaggccgacgtggcggcggaagcggacgtcgacgcgctgctggccgagatcgacgcgaccatgccgccgctgcgcggcgtctgccatctggcgggcgtggtggaggactgcctggtcggcgacgtcacgccggcctcgctggccgccaccctggccggcaaggcccgcggcgcctggctgctgcatgagcgcaccctggcttacccgctggaacacttcgtgctgttctcctccgccgccgccgccttcggcgcgccggggcaatcgacctacgcgatggccaacgcctacctcgacgcgctggccgcgcgccgccgcgcgcaaggcttgcccgcgctgtccatcgcctgggggccgtggcaggacgtgggcatgctggcccgctccagcgccaacgccaagcggcggctcgcgcagctgggcatcggccagatcgaggccgaatgcggccgcgccactttcgagatcgcgctgggggcggacctgccggcccacctcgtgctgctgcccatcgattgggggcgcttgatcgagcaatggccgccgcatgtgccggccagccgcttcgccggcatcgccaccgcccagccgggcgcgggttccacctcctcggtcagcgagctgctggcgctgccggcggaggaaagacgacatcgtctgttccaattgctggccgaggacgccgcgctggtgaccggcacgccgctggcctcgctggaccccgagcgctcgctgttcgactacgacctggactccttgctgatcaccgatctgcgcgtgctgctggaaaagcgtttcggccgcgcgataccgaccacggtgattttctcgaatccgaccatagccgccttggcggaccatctggcgcggacggtgttcggcatggccgaggcggaggcgacgcccgccgcgcccgccgccgagcccgacgcgccggcggacgccgcgatgtcgcaggaggagatcgtggaaatgctgtccgcgaaactgaaggaattggatagaaaggacgcgcga

SEQ ID NO: 47 - DNA, 3552 bp, Chromobacterium haemolyticum
atgagccagatcgacacgaccgcgctgatgcggaacgcgctgcgcgagatcgaacgcctgcagcgcgaactggacggcgccgaacagcgccggcacgcgcccatcgccgtggtcggcatgggctgccgtttcgccggcgtcgactcgccggaggcgctgtggcagcagctgctcgacggcgcggacggcgtgagcgaggtgccggccgagcgttgggacgtcgagcgctacttcgacgccgacccggacgcgagcggccgcatctactgccgcaccggcagctttttggacgacatcgcctccttcgacgccggcttcttcggcatttcggcgcgcgaggcggcgatgctggatccgcagcagcgcatgctgctcgaggtggcttgggaggcggtggagcgcgccggcatgacggcggcggaattgaagggctcggccaccggggtgttcgccggcgtcatgcatcaggactacgcgcaccgtttccgccgggcggaggaggtcgacctctacaccgcctcgggcaacgcgcccagcgtgctggcgggccgcgtgtcgcacgcgctcggcctgcacgggccgacgctgacgatagacaccgcgtgctcgtcgtcgctggtcgccgtgcacctggcttgcaacgcgctgcgtgccggcgagtgcgacatcgccatcgtcggcggcgtcaatgtggtgctgtcgccgttgtccaccgccgccgaatgtcgggcgcacatgctgtcgcccagcggccgctgccgctccttcgacgatggcgcggacggcttcgtgcgcggcgagggctgcggcgtggtggtgctgcagcggctcgccgacgccgaggccgccgggcggaccatagacgcgctgatcgccggctcggccgtcaatcacgacggccgcagcgcgggcctgacggtgcctaacgagcacgcgcagcgcgagctggtgcgggcggccttgcgcgccgcgcgcatcgacgcgtcgcaggtgaattatatcgaggcgcacggcaccggtaccgcgctgggcgacccgatagaggcggcggcgctggcctccgtgttcgccggccgcggccgcgaggagcgcgtgctgctgggctcgatcaagagcaatttcggccatctggaaggcgcggcggggatagccgggctgatcaaggcggcgctgacggtgcgccatggcgtggtgcccgccaccctgcatgtgcgcacgcccaaccgcggcattgagtgggacacgctgccgctgcgcctcgcgctcggcgcggagcgcatagacgccggcggcgcgccctgcgtcgccggggtcagctccttcggcttcagcggcaccaatgcgcacgcggtgctgctcgcgccgccgcgcgcggccgccggcgaaacggcggccggcgcggacgaaggcgcgcaattgctggtcgtttccgcgaaatccgacgcctcgctgcgcggcaacgcggcgcggctggccgcccatctggccgggctcgacgccgcggcgtgggcggccgcctgccacgcgtcgcgggcggcgcgctcgcatttcccgcatcggctcgcgctgacggccgtcagcgcggaagagatggcgcgcgagctgagccgcttcgcgcgcggcgaggacgccgccgttcacagcggcgtgtgcggcgggatgccgcccagccgcgacgcgtcgccggagacggcggacgcgggacgcgaaccggccgagcggctggacgccttggcgcggcgctatgtggccggcctgccggtcgactggccggcgccggccggcgccgggcgccgcgtcgcgcggctgccgagctacgcatttgatcgccagccttactgggtggacgaagggcgggcgcaggcggagtcgccgctgtaccgcatcgcctggcagccgctgccggccccggccggcgcgcgccgctcgggcgagcgcatcgtcgccggcgatccggccttgtgcgcggaagtggcgcgcgcgctggaagccgccggcgagcgctgcgcgattgtgcccgccgagatcgacgccatccgccgcgcgggcgacgccggcctggtgctcgccttcgagcgcgcggccggagacgaggacgcgctggcggccgtcgcgcgccgcggcgccttgctgagcgcgctggcgcgagagcgcgccgcgacgccgtcggcggcgccgatcacggttgtcacgcgcggcggggcggccaccgggccggcggaggaggtcgatcccgtcctcgccgccttgagcgcggcggtgcgcgtcgcgcggcgggaacagggccggagctggcgcggcacgatagatatcgacggttcgccggcgtccttcgacgcgctggcggccttgctcgccgatgaagccgccgaggaacaattggcggtgcgcggcgccgccgtgttggcgccgcggctgcggcgcgcgggcgccggcgcggccggcgcgctccccgcgctggacggcgacgccgtctatgtggtgaccggcggcaccggcgccttgggcctcgccaccgcgcgctggctggccgggcgcggcgcgcgccatctgctgttgatcagccgcggcggcgaagccggcgcggcggcgcaggccgcttgcgcccgtctgcgcggcgacggcgtcgaggtccgcgtggcggccgccgacgtcgccgacgaggccgccttgcgcggggcgctcgccgcggccggccggccgatacgcggcgtcgcgcactgcgcggggattgtgcgcgacgcgacgctggacgcgctggacgccgcggccttcgccgagaccctgcgcgccaaggtgggcggcgcggtcttgctggaccggctgaccgaggccgagccgctggacttcttcctgttgtattcgtccatctccgcggcggtcggccgtcacggccaggccgcctacgccgccgccaacggctatctcgacgcgctggcgcagcggcggcgcttgcgcgcgcggccggcgctgtccataggctggggatcgtgggcggccggcatgggcgcggccgacgcgaagacggcggaacggattcgcgccggcggcctgaacccgctgagcgagggcgaggccttcgccgcgctggaacgggcgttcaccggcgagccgcatctggtggtggccgcgatcgatcttgcgcggatcgcggcgcagcccgatctgccgccgctgatcgaaggcctggtcggccgcgcgccggcggcgaatgcgcggaccctgtctttcgaccaactgcgcggccgtcccgccggcgagcgccgcgcgcgggtcgccgattatctggacgcggaactgcgcgcggtgctgtccagcccggccgccttgccgcgtcagacttcgctgctggatctgggcgtggactcgctgaccggcgcggaactgcgcaacgcgcttgagcgcgcgctgggggtgtccgtcgcgatctcgcacctgatcgacggctcctcgctggacgagctgatcgaccaggtgatggcgcaactggagcgcaagctggtgacggaacaacattcggccgcgggcgccgacacggaggaaatcacgcta

SEQ ID NO: 48 - DNA, 9552 bp, Chromobacterium haemolyticum
atgaacgacaacgccgttttcccctcccgcaatccgcacgccgcggccgccccggcagaaaccttcgccgccctgttcgcccgaagcgcggcggaccatcccgacgccatcgcgctgcgacacggcgcgcgcgcgctcagctaccgcgagctggacgaccaggccaaccgtctggcccattatctgcgggagctgggcatagaccgcgaaacgccggtggggctgtgcctggaccgctcgcccgaacaaatcatcgccatgctggccattttcaaggccggcggcgcttatctgccgctggaccccgattacccgcgggaaaggctggcctatattctcaacgacgccatgccggccgcgctgctgacgcgggccgcgctgaccgagcaactgccggtccactgggcgcgggtggtggaactggataccgagcagtccatatggcaggcgcagccggatcaggcgcttccgcttcacgatttcccggaccagctggcgtacctgatctacacctcgggctccaccggccagcccaagggcgtggcggtgactcaccgcggcataggcgcgctggcgcgcgcgcagagccgccgcttcggcatcgccgccggcgcacgcgtgctgcaattcgcgtcttccagtttcgacgcggccttctccgaagtcgccatgaccttgctctccggcgcctgtctggtcaccgcgccggcggcggaattgacgccgggcgcggcgctggcggacttgctcgcccgccagaaaatcagccatctgaccctgcctcccagcgcgctggccctcatgccggatggcggcatcccgcaggattgcggcctgatcgtcgccggcgaggcctgcccggcggcccaggtgcggcgctggtccgccggccggaccatgcttaacgcctacggccccaccgaggccaccgtgtgcgcgacgatgagcggccagatgcgggacgaggcgcccgccgacatcggcgcgccgctgcccggcgtccaggcttacgtgctggacgacgccctgcggccgctgccgccgggcgtcgagggcgagctgtatcttgccggcgacgggctggcccgcggctatctgggccggccgtcgctgagcgccgagcgcttcgtcgccaatcccttcggccccgccggcagccgcttgtaccgcagcggcgacctggcgcggctgcgcgccgacggcgcgctggactacctgggacgggcggacgaacagctcaagctgcgcggctaccgcatcgagcccggcgagatcgaacacctgctgacccagcaagccggcgtgagccaggccgtggtccgcctgcgcgaagacctgcctggcatcaagcagttgatcgcctacgtcgtttcccgcgccggcctgcaagccgacggcgcggccttgcgcgcggcgctggccgagcaactgccggattacatggtgccggcggcggtggtgccgctggagcgcctgccgctgacccccaacggcaaggtggacaaacaggcgctgcccgcgccggatttcgaaaacgccgacgccggcgaggcgcgggactggctggagaaaacgctggccaagctgtacgcggaagtgctggggctgtccagggtgggtctgggccagggtttcttcgatctgggcggcgacagcatcagcgccattctgctggtcagccgcgcccgcgcccacggcctgcaattcagcccgcaggacgtgttcgaccacccctgcatcgagcgtctggcgctccgggtccgcccggtggacgccgacgcggcggcgggtgaattgccgccgcccagcgccgcggacctggaaagcctccgcgcccgctatccggcggtcagcgcggtgctgccgctgtcgccgctgcagcggggcctgctgttccacctgctgtacgacgaaggtcaaagcgacgtctatctgatacagatgggcttccagctggacggcccgctggacgcggacaagctgcgggcggccgccgaaggcttgctgcaacgccatcaccatctgcgcgccgccttctccgcggacgggctggagcagccggcgcaaatcgtgctggagcgcgtggagacgccctggcgcgagctggacctgtccgcgcatcaggccgatgaacagcagcgcgccctggaacagctgcgcgcggacgactacgccgccggcgtggacccggcgcgcgcgccgctgctgcgctttaccttggtcaagctggacgcggagcgccaccagctgctgtggagcttccaccacctgctgttcgacggctggtcggtgccggtgctgctgcgcgaactgttcgccctctaccgcggcgacgcgctgccgcccgccattccctaccgcgattacctggcctggctgcacacccgcgaccgcgacgccgccaagcgccaatggatcaagcatctggccgggctggagcagccggcgcgcctggcgcccagcgcgtcccaaagccggcagctgccgcgcaaccacaatgtgacggcggacccggcggtctacgccgcgctggaacggctggcccgccggcaaggcctcaccctcaacaccttgttgcaagccgcctgggccattctgctcgcccgcctctccgcctcagacgacgtcgttttcggcgtcaccgtctccggacgcccgccggagctccccggcgtcgagcgcatggtcggcctgctgatcaacaccgtcccgctgcgcctgcggctgcagcccgaggaaaccctgaccgccctgctgcaacgcttgcaggcccagcaggccgcgctgattgagcatcaacacctcagcctcgccgagatccaacaggcggccggccttggcgatttgttcgacaccctgctggtctttgaaaactatccgatcgccgatgacgatcgccgcgtggacgacgcgctgtccatcggctatctgggcggccagggcgtggacacctcgcactatccgctcaacctgtgcgccgtccccggacccgaactcgagctgcgcttcggctatcgacccgacctcttctccgccgacgccgtagacggcatcgcccggcaattgctggaactgctgcgcctgatcgccgaacagcccgagctgccgctcgcccgcatcccgccggccacgccggcccagcaagacgcgctcgccgcctggaaccgcaccgacgccccgctgcccgccgccaccctgacccagttgctggaacgtcaggccgcgctcagccccgacgccgaggcgctgcgcttcgacgaggccgccctcagctaccgccagctgcaccagcgcgccaaccgcctcgcccgccgcctgcgctccgacggcgtcggccccgaaaccctggtcgccgtcgcgctgccccgctccatcgatctggtcgtggccctgctcgccgtgctcaaggccggcggcgcttatctgccgatcgatctcgactacccgcccgaacgcatcgccttcatgctggccgacgcccagcccgccgtggtcctgtcccgctccgagctgctggccggcctgccggtcgaacacgccttatgcctggaccagatcgacgatgcgctcgagaccctgtccgatgcgccgctggagctccccggcgacgacaggcatccggcctacgtcatctacacctccggctccaccggccgccccaagggcgccgtcaacagccaccgcgccatcgtcaaccgcctgttgtggatgcagcacgcctacccgctggccgccgacgacgtggtgctgcaaaaaaccccgtccagcttcgacgtctcagtctgggagttcttctggccgctgctcgccggcgcctcgctgctgctggcccggcccgacggccatcgcgatcccgtctatctggccgagctgatccgccgccgcggcgtcaccaccctgcatttcgtcccgtccatgctggacgccttcctgcaggaacccgccagcgccggctgcgccagcctgcgccgcgtgctgtgcagcggcgaagccttgcccgcgccgctgctggcccgcgccgcccagacgctgccctgcccgctgcataatctctacggtcccaccgaggccgccgtcgacgtcaccgcctggacttgcgatccggtgcgcgacagccgctcggtgcccatcggccatccgatctggaacacccagctcttcgtgctcgacgccatgctgcggcccttgccgcccggcattcccggcgagctgtacctgggcggcgtcggcctggcccgcggctatctgcgccgtccggctctgactgccgagcgcttcgtcgcccatcccttcgccgccggacagcgactgtaccgcaccggcgaccgcgtcgtccgccgcgaggacggcgcgctggactacctgggccgcctagaccatcaggtcaagctgcgcggactgcgcatcgagctgggcgagatcgaagccgcgctgctggatcagcccggcgtcgcccaggccgtggtcctgatccgcgaggacgcgcccgggcagcgccggctggtcgcctacgcggtgcccgccgccggcgcccaggccgacgtcgcgcgctggcgcgacgcgctggccgcccgcctgcccgactacatggcgcccgccgcctgggtggcgctggacgcgctgccgctgacccccaacggcaagctggaccgccgcgccttgccggcgccggaactgacgctggccgaacaccgcgagccggtcaccgaaaaagaaaaactgctggccgaagccttcgcccagaccctgggcctggagcgcgtcggtctggacgacagcttcttccatctcggcggcgacagcatcagctccatccagctggtgagcctggctcgcaagcggggcttgggcctgacgccgcgtcaggtattcgaacaccccagcgtccgcagcctcgcccaagtcgcggccgaggcctcggccctggccgttgacgcgcgcgccgacgcgccgctgctgcggctggggccggccgaaatcgagcgcctgagccgccgccgccccggcctcgccgaactgctgccgctgacgccgctgcagcaaggcctgctgttccacgcgctctacgaccattccgccgccaacccctatgtggtgcagatgcgcatcgagctggacggcgcgctggacggcgccgcgctgcgccgcgccgtcgaacgtctgcttagccgccacccgcatctgctggcctccttcattcacgaggacaccctgcaaccgatgcaggccttgagcctggacagcgccgcgccgtggcgggaagccgatttgtcggcgctcagcgacgacgaggcgcgcgcgcggctggaaaacatgcagacggccgatcatggggagagcatgccgccggaccgcgggccgctgctgcgcttcaccctgatccggctggcgccggagcgccaccgcctgctctggactttccaccacctcttgctcgacggctggtcccttcccgtgctgctggaagaactgttcgcgctctaccgccagggagaatcggccgcgctgccgcccgcgccggcctaccgcgattacctgctctggctgtccggccgcgatcaggccgccgcccgccaggcctggggccaatacctgcgcggcgtggacgagcccaccctggtggcgcccggcctccccgccgcggaacggcggccggatctgcacaccgccgcgctgacggcggagctcagcgccgcgctgtccgcccaggcgcggcgtcgcgggctgaccctcaacaccctggcccaggccgcgtggggcctgctgctggcccgcctgaccggccgcgacgatctgctgttcggcatcaccgtgtccggacggaccgcgccgctggaagacatcgcgcggctgcccggcctgctgatcaacaccgtgccgctgcgcctgaaactggaaccgtcggccacgctggccggctggctggacgatctgcaatcgcgccaggccgcgatgatggagcatcagcatctcggactcggcgacatccagcagctgacggacatggaggagttgttcgacacgctgatggtgttcgaaaactatccgcagctcgacgcgctgcgccaaagccgcgccggcgacggcctgagcgtgcgccccgtcgacggtttgggcggcgatgtgtcgcattacccgctgggcctctgcgtggtgccgggagaaaggctggagctccggctgggctgccgcgccgacgccttcccgccggccgcggccgagcgcattctcgccagcctgacgcgcctgttccaggcgctggccggcgatcttgagcggccgctggccagcctgcgctggctggacgaggccgagagccgccagctggacggctggaacgccaccactcgcgccaccgcgccggcgacgctgcccgagctgttccgccggcaggcccggctgacgccggacgccgtcgcggtctgcgccggcgacgttcgcctgagctaccgccagctggatctgcaatccaacgcgctggcccaccgcttgcgcgcggccggcgtgaccgtggaaacgccggtggcgctgtggctgcggcgcggcccgctgctgccggtggccatcctcggcgtactcaaggccggcggctgctatatcccgctgcacaccgcccagccggaggagcggcgggcctggaccctgacccagtcgcgcgccgctttgctgctggccgacgaggcaccggcgccggccatgctgccgccgggcctgccggtgctgcggatagacggtccgtccgacagcgccgagcacccgccccgcctggagctgaccccggacgcgctggcctatgtgatgtacacctccggctccaccggcgtgcccaagggcatagccgtcagccacgccaacgtcggggatctggcgctggaccgccgctgggagggcgcgtcccagagcaaggtgctgctgcactctcctcatgccttcgacgcctccacctacgagctgtggacccccttgctgcacggcggccaggcgacgctggcgccgccgggagacaacgacatcgactcgctggcggacgtcctgcggcgggaaagcgtcaccgcggccttcctgaccaccgcgctgttcaacctgctggccgaggagcggccggactgcttcgccagcctgcgcacgctgtggaccggcggcgaagccgcctcgctgcgcgccttccagcgggtgcgggagcgccatccggagctggagctggtccacgtctacggccccaccgagaccaccaccttcgccacctgctacccgctgccgcgcgatcagccactggctgcgccgctgccgataggcgcgccgatggacaatacccgcgcctatgtgctggattccgcgctgcgcccgctgcccgtcggcgcgcccggcgaactctatctggccggcagcggcctggcgcgcggctatctggatcagccggcgctcagcgccgagcgcttcgtggccaaccccttcggccccgccggcagccggctgtaccgcagcggcgaccgggcgcgctggcgcgccgacggccagctggaattcctcggccgcgccgatcaacaaatcaagctgcgcggcttccgcatcgaactgagcgaaatcgaggccaggctgagcgaacacccggccgtgtcccaggcgcgggcggtgctgcgcgagacggacggcgcgccgcgccagctgctcgcctatgtcgcgctccaccccggcgccgacatcgccccgtccgcgctcagacaagccctggcggcacagctgcccgactatatggtgccggccgccgtcgtcgcgctggacgcgctgccactgacccccaacggcaagctggaccaccgcgcgctgcccgcgcccgatttccaggccggcgagcggcggcctccgcgcagcgacgccgaacgcatcctggccggcctgtacgccgaactgctgggcctggacgaagtcggtctggacgacggtttcttcgatctcggcggcgacagcatcgcctccatcctgctggtcagccgcgcgcggcggcaaggcttgctgctcagcccgcgcgaggtcttcctccatcctcgggtggaagcgctggccgccgtcgctcggccggtcgtcgccgtcgcggccgaggacaccgcggagggcccgctgccggcgacgcccatcatccgctggtggctggagcgcggcggcccgcaaagcggcttctaccaatccatgctgttgcaaacccccgccggattggaacaagcccatctgctgcaggcgctgcaagcactgctggacaaacacgacgcgctgcggatgcggctggacgcggacggcggcctgacggtgccgccgcccgcttcgacatcggcgcaggactgcctgcgccgcatcgcggcggacgcgcatctggagatcccgccggccgacatcgccgccgcggcgcggcagctggaccccgccgccggcgccatgttgcgggcgctgtggctggacgccggcccggacgcgccgggcaggctgtggctgggcatccatcacctggcggtggacggcgtttcctggcgcatcctgctgcccgacctggcctccgcctggcgcgaggcccgcgccggccaagccatccggctggatccggtggccacttccttccgccgctgggcgctgctgctgaacgaggacgccgtccgcgccgcccgcgcggccgaagcgccgatgtgggcggccatccaagaccagcccgatccgccgctatcgccctgcccgctggacccggcgctggacacggccggcgccagccggcgtctgagcgtcgccctgccttccgccgtcaccgccgatctgctgacccaggtgccggcgctgttccacgccggcatcaacgacgtgctgctcaccggcttcgcgctggcggtggcgcgctggcggcatggccggggacgggacggcggctccgcggtgcgcctggaattggaaggccacggccgcgaggagctgggcgagcattgcgacctctcccgcaccgtgggctggttcaccagcctgttccccgtctgtctcgaccccggcgcctccgccgcggccgccctggacgacgacgccgtgctgggcgcggcgctgaagcgggtcaaggagcaattgcgcgcgctgccggaccggggcctgggatacggcctgctgcgctatctcaatccggagaccgccgcccggctgagtggcgcggcgccggcgcaactcggcttcaactacctgggacgcttctccacgccggcgcgcggcgactggatgccggcgccggaagcggccgggctggacggaaacagcgattcttcgacgccgcagacccacgccatcgagctcaacgccgccacccacgacggcccggacggcccggaactggtggccacctggctgtgggccggccgcctgttcgaccggcaggagatcgagaagctggcggaggactggttcgacgcgctgcgcgccttggccaggctgggccgcgcgccggacgccggcggcagcaccccgtccgaccaccccctggccggcgggctgtcgcaggaggagatagacctgatcgaagccggcttc

SEQ ID NO: 49 - DNA, 5715 bp, Chromobacterium haemolyticum
atgaacaaaacattatcaaacgccgcgcagcaagccggctcgaaagtcgagaccatgctgccgttgacgccgacgcagcagggcctgctgtttcatacgctgaaagcgccggagtccggcgtctattacgaacaggtcgcttgcgccttccaggtcgcgctagacgcggccgattaccggcgcgcgctggaagcggtgatcgcgcgccacggcgtgctgcgcaccggctttctgtgggacgggccgtccaagccggtgcaggtggtcttccgcgacgtcgaactgccgtgggtggaggaggactggcgggctttcgatcccgaggagcagcggcggcgcctcgccgcctaccgggacgaggaccggcgtccgggctttcacctgagccgcgcgccgctgatgcgctgcgccttgttccgcaccggcgaagaacgctatgagttcgtgtggagctatcaccatctgctgctggacggctggtcggtgcagatcgtgctgggcgaagcgctcgcctgctacgacgcctaccggcgcggggccgatcctgccttgccgccgccccagccctacagcgcttttctgcgctggctggaccagcaggacggcgcggcggccgaagccttctggcgcgagcggctgggcgatgtgcgcgcggccacgcccttgccgctggccgaggaggccggcccggaacacgcgtgcggccacggtctgctggaacgcgagctggacccgcggacgagcgagggcctgcagcggctggcgcgcgcctgcgagctgacgcagagcacggtgatccaggccgcctgggccttgctgctggcgcgagcgagcggccgcgacgacgtggtgttcggcaccaccgtgtccggccggccggccgagctgcgcggggtcgagcagatggtggggctcttcgtcaacgcgctgccgacgcgcgcgaccgtggacgccgcgcagacgctgggcgactggctcaggcagctgcatcgccggcatgtggacgccgaagcctacgcctatacgccgctgcacgcgattccgggctggagcggcgtggccccgggcgcgcccttgttcgagagcctggtggtgttcgagaactatccggcgcgcgcggacgcgacgcgctatcgggaacggctgggcgtcggcgacgtcgaggtggtggaacagaccaactatccgctgaccgtggtcgcgattcccggcgagcgtctgcgcttgcgcctgcattacgatcgccagcgcgtgtcggaggcgtcggcggagcggatcgtcgcgatgctggcgcggctgctggagcagttcgaacgcggcggcgccgcgctgcgcatcggcgcggcgtcgctgctgggcgcggaggcgggcggcgcgctggtcgcgggctggaacgcggcggcccggcgcgcggacgagacggcgcgccagtgcctgcatcgccgttttgaggcgcaggcgcgcgcgcgtcccgacgccgtcgcgctgcaatgcgagggcgaggcgctgacttacgccgaactggatcgccgcgccaaccggctggcctggcggctggacgccgccggcgtgcgcggcgacacgccggttgcgctggcgttcgggcgcggcgtggacagcatcgtcgcgatactggcggtgttgaaggcgggcgccttctatgtgccgctcgatctcgaccatccgccggagcgtctcgcctggatactggaggatatcggcgccggcgcgctgatctgcggcgaggaagcgcgcgagcgcttcggggacttcggtggggttctgatcgggatgggagatgcggcggagtccggcgagcgcgaagacgcgccgccgccgcgtgacacttcgcccgccgacctgtgctacgtgatctacacctcgggctcgaccggacagcccaagggcgtgtgcgtggagcaccgcaatgtggaccatctgttcgcggcgacgcgccggagctacggcatcggaccgtcggacgtgtggaccctgttccattcctacgccttcgacttctcggtatgggaaatctggggcgccctgctgcacggcgggcggctggaaatcgtgccttaccgctgctcgcgcacgccggaggcgtttctcgcgctgttggagcgcgagggcgtcacgatgctgagccagacccccagcgccttcaagcagctgctgcgcgcgctgggcgacgcgcggcggcccttgccggccggcttgcgccatgtgttcttcggcggcgaggcgctgattcccagccagttcgccgcctgcctgggcgaggagagcggcgtcgcgctggtcaatctctacggcatcaccgaaaccacggtgcacgtgaccgagcgcgtgctgggcgcgggcgacgcgcgctcctcgcgcagcccggtgggccggcccttgcccggctaccgtatctacctgcttgacgccgccgggcatccggtgccgccgggcgtgccgggcgaaatctacgtgggcggggagggcgtggcgcgcggttatcacaagcgtcccgagctcgaccgcgaacgcttcatcgccgaccccttcctgcccggcgagcggctttaccgcagcggggacctcgggcgctgggacgcggacggcgagctggactatctgggccgcatcgacgagcaggtcaagatccgcggcttccgcatcgaactgggcgaggtggaggcggcgctggcccggcacccggacgtcgccgccgcggcggtgatggtggacgaggcgagcatagacggccacgcgcagctggcgggtttcgcggcgccgcgcgagggcgcgtcgctctctcccgccgcgctgcgggactggctggcgcagcgcctgccgccgcacgcgattccggcgcgcctgatcgaggtggacgcgatcccgctgacccctaacggcaagctcgatcgccgccggctggccgacgcgctggcggcggacggcgacgccgcgcgtccgcacgtcgcgccgcgcgatgcggtggaacaggcgctggtcggcgtgttcgaatccgtgctcaagcgctcgccggtcggcgtcaccgacaacttcttcgagctgggcggggactccatcctgagcatccagatcctgtcggccgcgcacaaggtcggcatcgacttcacgctggacgagctgatgcgctcgctgaccatagcaaggctggcgccgcgggtccggcgcacggattcgccgccgccggccgcgagcgcgccgccgccgccgctggacgccgcctacgaggacgtctatccgctcagcgcgatgcagatggcgatgctggccaacgagatgcggcacggccaggactccgcctatcacaacgtcaacgatcagcggctggccctgcccttcgacgcggccgcgctcgaggcggcgttgcgcggcgccttcgaacgccatccggcgctgcgcaccgccttcgatctggccgccgacgaggagccgctgcagtacgtgcaccgccaagtgcccttgccgctggcggtcagcgactggcgaggcctggacgcggcgcggcaggacgcgcggattctggattggcgcgaggccgagcggcgccggcgcttcgacgtcgagcatccgccgctgatccgcttcgccgtgcatcgcctgagcgaggaggagatgcatatcggcgtgaccaagcaccacgcgattctggacggctggagcttcaacctgctgctctccgagctgatctcggactattcggcgcggctggccggccggccgctggcgctgacggcgcccgccagccgctaccgcgacttcgtcgagcgcgagcgcgaggcggcgcgttcggacgcgctgcgcgactggtggcgcgcgcggctgcaatccttgccggccacgcggctggcgcgggagccggacggcgacgcggcgccggcggaggtgccgatttcggccgctgagtccgccggcctggaagcgctcgccgcgcgcgcgggcgcctcggtgaagagcgtgctgctgacggcgcatctgctcgccttgtcgcgcatctgcggcaggccggcggtgacgagcggcgtggtgttcaacggccgcagcgagggcgcggacggcgaccgggtgctgggcctgttcctgaacagcctgccgctcggcttcgatttcccggccggcgtcttcgacgcggtcgcgctggtgcgcgcggtgcaggcggccgagctggaggtgttcagccgccggcgctatccgctgatcgaactgcatcggcaggtgggcacggtgttcgacgcgctgttcaacttcacgcacttccgcgcgctggaggacgcggtgcgcgacatcgaggtgtccgacggctacgcgagcgacacgaccaatgtgccgctggtggtgcaaagcagcttcgacggccggcaaggcgtattgcggatcaccctggtgccgtcgcgcgggcatttctcgacggagaccgtggtccgcttcgtcgcggagtacgtggcggccttgcgcgcgttgctcggggaaaccacggcgggggacgcggccgccggcggcgcgagcagggcggacggcggcgagcgccggagcctggcctcggcggccgccacgccggcggcggccaaggcgcccgccgccgcgcggcccagcggcgcggcgttgcgacgcgagctgagcgccttgtggacggccgtgctcaagcgcgaaccgccgtcggaggacagcgatttcagcgcgctgggcggagattctttactgatgctgcggatctgctcccgcgccggccgggcctttggcctggacgcggcggtggtggcccgtctgttgacggcgcagaccgtggccgagcaggcccggatcatcgagaccgagggcgcggacgcggacggcgtccgggtcggcgcgctcgtcgcgctgtccgcgccgggcgacgcgccgccgctgttcttcgcgccgggcgcgggcgggcatgtgccgtatctgcgcgcgctcgcggccgagctgtccaaggacttctcggtatggggcatggagctgcccgggtccggcgaggccgacgcgggcggcgtcgaagccatcgcgacggcgctgatcgccgacatccggcgggtgcggccttacgggccttatcgcctgggcggccattctttcggcggctgggtcgcgcttgagattgcgcggcaactggccggccagggcgaggcggtggcttgggtctccatcgtggacagcctgccgccggggtcggcggcgcggccgcacaagcgggactggcgggacagccgctggatggcggagatcggcaacagcttcgcgcgtctggccgacgccaagctgctattcgacgccgacgaattcgacgcgctggacgatgcgcggagagtggaacgtttgcgcgagcgcttgatagcggcgggcgtgctgccggaggagcttggcctgcccgagttcgcggcgcgcgtgcgcgccttcatcgcgcattcgctgacggattacgcgccggcgacgccttatgccggcgcgctgcatttaattgtggccgcggacagggacggcgaggcggatgcgcccgacgccgccgcgctcatcgacggctggcgcgcggcggcgccggccgcggcgacggcgctgcgcctgcccggcgatcacgtcggcatcatgcgcccccccttcgtcagcgggctggccggcgccttgcgcgccatggaggccgccgcgcggcgggccgtttcggacatggaaaccgaggaagaacaa

SEQ ID NO: 50 - DNA, 1170 bp, Chromobacterium haemolyticum
atgaacaccagagtcaaggcattcgccgccgtcgaggcggcgctggcggaaccggaggcggcgctcgccaacggcgatttcgaaaccgtggaacagttgatgagcggcatccgcgcggccaaccgggcgcacggcctgtggctgccgcaggtgccgcgcgccgacggcggcctgggcctgaacctgcttgagctggtggaggtgggcgagctgctgggcgcctcgccgctgggccattacgcggtcaactaccaggcgcccgacgccggcaatatcgacgtgttgctggagtacgcgactcccgcgcagcgccggcgctggctggagccgctattgcgcggcgagctgcgcagctgcttcgcggcgacggagccggagtccgccggatcgaatccctcctcgctgaaaacgacggcggtgtacagggacggcgcctggcatctgaacggccgcaaatggttcgcgtccggcgccgacggcgcgggcttcgccatcgtgctggccgtcaccgacgaggccgcgccgctgcacgcgcgcaccagcaccttcatcgtgcccgccgacgcgcccggcttccgccacgtccgcaatctgcgggtgatgggggacgagggctgcggctgggccagccacggcgaactggtgctggacgattgccgggtgggcgaggacgcgatgctgggcaagcccggcgagggcttcgtcgtgctgcaggccaggctcgccaccgggcggctgcaccattgcgcgcgctggataggcgtgtgcgagcgcgccttcgccatcatgtgccggcgcgcctgccgccgggaactggcggcgggcgagctgctgtcctcgcgccagacggtgcagaactggatcgccgagagccgcgcgtcgatagacgccgcgcgcctgctggtgacccaggcggccacgcggctgcaaaaccgccacgagcgcgcgcagatcgacatctcgatcgcgaagttcttcgtggccggcgtgacgcagaccgtgctcgatcacgcgctgcaggtgcagggcgcattgggcgtcagcggcgacacgattctcaatgtgctgtggcggcacgaacgcgcggggcggatttacgacggcccggacgaagtgcacaagagcctggtggcgcgccatgcgctggccggcttccggcgggagctggca

SEQ ID NO: 51 - DNA, 1677 bp, Chromobacterium haemolyticum
atggttcgcgtccggcgccgacggcgcgggcttcgccatcgtgctggccgtcaccgacgaggccgcgccgctgcacgcgcgcaccagcaccttcatcgtgcccgccgacgcgcccggcttccgccacgtccgcaatctgcgggtgatgggggacgagggctgcggctgggccagccacggcgaactggtgctggacgattgccgggtgggcgaggacgcgatgctgggcaagcccggcgagggcttcgtcgtgctgcaggccaggctcgccaccgggcggctgcaccattgcgcgcgctggataggcgtgtgcgagcgcgccttcgccatcatgtgccggcgcgcctgccgccgggaactggcggcgggcgagctgctgtcctcgcgccagacggtgcagaactggatcgccgagagccgcgcgtcgatagacgccgcgcgcctgctggtgacccaggcggccacgcggctgcaaaaccgccacgagcgcgcgcagatcgacatctcgatcgcgaagttcttcgtggccggcgtgacgcagaccgtgctcgatcacgcgctgcaggtgcagggcgcattgggcgtcagcggcgacacgattctcaatgtgctgtggcggcacgaacgcgcggggcggatttacgacggcccggacgaagtgcacaagagcctggtggcgcgccatgcgctggccggcttccggcgggagctggcatgagcgcgcggatcgcggagcgcgcgatggcggcgctgggccgcccccgcgtcggcgcgcgcgcgacgcgggtgggcggcggccgggccagcgaggtgttcctggtgcagggcggcgacagcgagctcatcgcctactggctgccggagggcggcgcgcgcgaggcgagacgccgctacgcgctgctggagcggctgtccggccagttccggctggcgcccaggccgctggcggtggacgaggacggcgacgccgcgctgctgctggttgaaaagctggatggcgtcgcgccggccgcctgcggagcgctcggccccgacaccgtgcgccggctcgcggaaaacttcatcgagacgctggcgagcctgcatgcgctggaggtcgcgccggccgaccggccccccgactatctgcgccgcatcctaagcgaatggcggcggcgctggaacgcggaggaggcgggcgcggcggtcgacgccgacttccgggcggtggccgactggctgagcgagcggatgccgcagaccgcgccctccgcctggctgcacaacgactacaagctggacaacatcctcgtcgatccgggcgatccggcgcggctggtgggcgtcgtcgattgggagctggccgcagtcggccatccgctggcggatctcggcgccgcgctcgcttactggatagagggccgggattcgtcgctgctgcggctggacgcgcccgggccgagctgcgcgccgggcgcgccgacgcgcgcggcgctggtggacctgtacgccgccgcggccggacgcgaggtgacggaacccgcctactggtacgcctacggcctgctgcggctggcggtgatcacacaacaactggcgctgcggcgccgcgacgaaggacagcgcgtgccgcgcgccaagctgatcgtgcgctggctgctggaccgcgcggcggaagcctgcggcggcggccggctg

SEQ ID NO: 52 - DNA, 903 bp, Chromobacterium haemolyticum
atgaataccgaaacttccacgactgtattcgacgtcatcgtgatcggcggcagtcacgccggacaatccgccgccttgcagatcgcgcgcgcgcgccgccgcgtgctggtgatcgacgccggcgcgcgccgcaatcgcttcgccgcccaatcccacggcgtgatcggcctggacgggcgctcgcccgacgcgatcgccgcggacggcaaggcgcaattgctggcctatcccaacgcgcaatggcgcgcggacaccgtggtccgggctgagagcggcgaggccggctacgcgttgcgctgcgcctccggccaaagctacgcggcgcgccagctggtgctggccttcggcgtggtggacgaattgcctgagctggagggcctgcgcgagcgctggggcgaaagcgtgttccactgcccttactgccacggctacgaactgaagcagggccgcatcggcgtgctcggcggcggccccctgtcctatctgtcggcgatgctgatgccggaatggggcccgaccgtcttcctgagcgacggcggcttcgagccggacgcggcgcagcgcgaggcgctggcgcagcggggcgtcgacatcgtgcgcgaacggatcgcgcgcatcgtcgagcgcgccaccgtcgagctggccgatggacgccggctggcctttgacgggctgttcatgatgaaccgcttccgcctgtccggcccggtggcggagcagctgggctgcgtgatcgaggaggggccgctggggccttatgtgcggaccgacgacgcgatggaaacatcggcgccgggcgtattcgcctgcggcgacatcacgcagcggggcggcaccgtggcgctggccatcggcaacggcgcgctggcgggcatcgccgcgcatcgcaaactggtgttcgga

SEQ ID NO: 53 - DNA, 474 bp, Chromobacterium haemolyticum
tccgtcaacatggctgacctatctccgtccgacgacatgcgcgccgccatggaagccttcttccatgcctacaaggctttcaccgataaaccggatgaaatgctggccaaacgcggcctggcgcgcgtgcaccaccgcatcctgttcttcgtcgcccgctaccccggcctgtcggtcaaggacctgctggccgcgctgggcgtgaccaagcaggccatcaatatgccgctgcgccaactgctggaaatggcgctggtgcaaagcgtggccgcacagcacgacaaacgggtcaaacagctgacgctgacttcggagggacgcaagctggaggaagccctgcaccgcgagcagctgaaactgctgcagacggcgtttgagcagacgggaaagccggccaccgccggctggatgcagatcaaccgcagcctggcctcgcactcgcgccccgacgacgcgccctcgcgcggcaaagct

SEQ ID NO: 54 - DNA, 597 bp, Chromobacterium haemolyticum
atgcacccgccgggtcgggggcggcgctttcacgatccgctgcgctaccggctggatcagcaggccgacgaggcgacggacgcgatcgcgccgctgctggaccggccttacgccctgttcgggcacagcatgggggcgagcctggctttcgaggtggcccagcgggcgcgggcgcgcggcctgccggcgccctgctgcctgatcgtgtccggccgcgccgcgccgcatctgccgccgagagggcggccgatacacggcttgccggacgatgagtttctggacgaggtgatgcgcatgaacggcacgccggcggaagtgctggcccatccggaactggtccaggtcatcctgccggtgctgcacgccgatttcgaggcgatagagacttaccgtcccgcgccgcgtccccctttgagctgccgcatcgtcgccctgggcggcagcgaagaagagggcggcgtcgaggcggccgcttcctggcagggctatgccaccggcggttttcgcagcgagatcctgcccggcgatcacttcttcctgaacgggagaccggaaagcctgttcgcgatactgaaggaggagcttggccgcgctgtg

SEQ ID NO: 55 - DNA, 333 bp, Chromobacterium haemolyticum
atgcgctggcgaggctcgtccatcgcattttcccgacctaccgcgccagtccggcgcgccgaggagcacgccatgaattgtcccagttgccaagtcaccctgctgatgggcgaacgtttgtccgtcgccatcgattactgtccgcaatgccgcggcgtctggctggcgcccggccagctggagcgcctgctgcaaacccaggctccagcggcccccgccgccgcttacgcgccgtccgcgcacggtcgcggccatgacgacgaacaccgtcgggacagccgccacggaggccatcacggcggcaagcatggctggctgcgcaagctgctggac

SEQ ID NO: 56 - DNA, 465 bp, Chromobacterium haemolyticum
atggctgacctatctccgtccgacgacatgcgcgccgccatggaagccttcttccatgcctacaaggctttcaccgataaaccggatgaaatgctggccaaacgcggcctggcgcgcgtgcaccaccgcatcctgttcttcgtcgcccgctaccccggcctgtcggtcaaggacctgctggccgcgctgggcgtgaccaagcaggccatcaatatgccgctgcgccaactgctggaaatggcgctggtgcaaagcgtggccgcacagcacgacaaacgggtcaaacagctgacgctgacttcggagggacgcaagctggaggaagccctgcaccgcgagcagctgaaactgctgcagacggcgtttgagcagacgggaaagccggccaccgccggctggatgcagatcaaccgcagcctggcctcgcactcgcgccccgacgacgcgccctcgcgcggcaaagct

SEQ ID NO: 57 - DNA, 1167 bp, Chromobacterium haemolyticum
atgcagagtaccatgttttctgagcgcatcgaacggctcagcggatcgctgatccgggaaatcctggcggcggcgcaacagccgcagatgatttccttcgccggcggcctgccggccggccaatgcttgccgcagctcgatttcaccgatatgccggcgggcctggcgcaatacggcgccagcgaaggcgagccggaattgcgcggcttgatcgcggagcaggcgcggcgcatgggcatcgcttgcgaggcggagcaggtgttggtgctgtccggctcgcagcagagcatcgatttatgcgccaagctgttcatcgatcccggcacgccggtggtgaccgaagggccgacctatctggcggccttgcaggctttcaagttgttcggcgcccgcgttcacgcagtggcgcaacgggaaggcaggctggagccgcaggcgctggccgccgccttgagcgagtctcaggcgcgctgctcttatctgattcccagctttcaaaatccggcgggcagctgttacagcgccgaagaccggcaggcgctggcggccgtcatcgacgccgccggcgtgcccttgatcgaggacgatccttatcgcgcgctcagctacgacggcgaagcgccggcgccgctggtcagccatttgaagcgcgcgccgtggatttactccggctccttttccaaaaccctggcgcctgggctgcgcgtcggcttcctgatcgcctcgccggagctgtatccctatctgatgcggctgaagcaggcgaccgatctgcacaccaaccgcccggcgcagtggttcatcgcccgccagctgagcgaccccggccatgagcaacggatgttggacttgcgcgaggtgtatcgcgccggccgcgacgcgatgcaggactcgctgcagcggcatttcggcgatctggccgattggcagttgccgcggggcgggctgtttttctggctcaagctgaagcggacgagagatacccgcgccttgctgccgctggccttgaagcagaacgtcgcctttatgccgggcgaggccttcttccccgagccggaacagaacctgggctatctgcgcctgaatttcagccatgcctcgccggagcggatcgagatcggcatcgccagactggcggccttgctgcgggataccgccgccgcggag

SEQ ID NO: 58 - DNA, 5286 bp, Chromobacterium haemolyticum
atggggcgggctacggcccggcctgtatttaaggttctcgcgatcgtcgcggcactcgtcgcggctgagcgcgtgacagggcgacggcgcaagccggcccgattagggcgacgcgacgactcgagccatgccatatgggtggattcgatgggcgcgcgcccggcatacccggagcagttgtcgatacatggaggtcatgcaatgtattcctcatccgatgtcgcatctcggcggacgcccgccgccgacaagttcggctctcatcaagctttttcgcatcgcgaagcgcctagcatcgcccggcagttgctgtggcgggcggaggcgagtcccgagcgtctcgcctacgcgtcggccgatccggagaaagcgctcgcgctaagctatgcggcgctgtgcgaacgcgcgtccggcatcgccgcgcgcctggcgcaagcgaccgaggccggcgagcgcgtgatgctggtctatcaggaaccgctcgatttccttccggccttcttcggctgctgcctggccggcgtgatcccggtgccggtggcgccgcgtcacggccgcgacacgatggcggcgatcgctcaagactgcggcgccgccatcgcgctgagcgcggaggcgcgggacgccttgccgggcctgcgctggatgcgcaccgacgaggccgagcgcgccgcgccctttttgcgggcggcgaaggacgccagtccggcgctgctgcagtacacctcgggttcgacgcgcacgccgcagggcgtggtggtcacgcaaaccgggctgtgggcgacgatagacgatcttgaccgcggcgcgatgcacgacgcggacagcgcgatgatcagctggctgccgtacttccacgacatgggcctggtgtacggcattctcacccccttgcaatgcggctttcccgcctatctgatggcgccggagaaattcgtcgcccagcccatgtcctggctgcgcgcgatagccgcgcggcgcggcacccacaccgccgcgccgaatttcgcctacgccttgtgcgcggaccgcgcgggcgatctcgcgccgggcaccgacttgtcgtccttgcgttatgcgctgaacggcgcggagccggtgcgctgtgacacggtgcgccgcttcgaggcggccttcgcgccgtttgggctgcgttcttcggtggtggtgccgggctacggcctggccgaggcgaccttgaaggtgaccgccggccgttgcggcgagggcacgcgcggcgtgcgcttcgcgcgggaggcgctggcgcgcggccgcgtgtcgccgcagacggacggcgtcgaattggcggcctgcggcgtcagcctgatcgatacgcgcgtccgcatcgtggacccggacacgcgcgcgccgtgcgcgccggacgccgtcggcgaaatatgggtgaccgggagcacggtcgccgacagttattggcgccgcccggaggagtcgcgcgagatcttcggcgcgcggctggccgacggcgacagcgcatggctgagaaccggcgatctgggctttctgcacgagggcgatctgttcgtcaccagccgcttgaaggatttgatcatcgtcggcggccggaatgtctacagccacgatctggaagacaccgtgtcggcctgccatccgtcgattcggaaggggcgcgccttcgccgccgccgtcgacggcgaggacggcgaagggattctgatcggcgccgaggtgcgcggcggctgcggggaggcggaggcccgtgacatcctgccggtgattcgcgcggcgctggcgcgggagcacggcgtggcgccggcgcgcatcgcgctgctgtggcgcggcagcatcctgcgcacctccagcggcaagacccggcgcggcgccacccgcgacgcgctgctgcgcggcgaactgcgcatcgtcgccgacgacgcggccgaggcggccgacgacgcgattctggccgagatcgcgcgcttcgtgcccggcgtggccgcgtcgcccgacgccaggctgatcgatctggggctggattcgctgtcggccgcgcggcttgccgccgccgcgcgcgcgcgtcatggcgtggagttgtcgttcgcggcgttgttcgcgctctccgcccggcaactgcggcgcgagatcgtcgacgccccgcgcctggacgccgcggcgccggccgcggctcgccgttatgcggcgggggaggcgttcgaactgtccgagatgcagcaggcttactggataggccagcagggcggggtgccgctgggcagcgtgtccccgcatatccgcgtggatttcgagatagacgccgcgcgcgcgccggaactgggccggcgcctcgcgcggctggtcgcccgccacccgtccttgcggatgacggtgggcgcggacggacgcggcgcgttcgacgcgctggcctacgaccccttgctgccgccgcaggatttgcgcgggctggacgcggcggaggcagcggaacggctggaggcgacgcgcgagagcctggccgagcgcgacggcccgcccgtgctcgccgtcgtctcccgtctgaccgagagcgcggctatcctgcacctgcggctcagcctgctggccggcgatctgcgcagcttcctgcaactgatggccgagctggcgcgcgacgcggccgacgaggcccccgcgcaatgcatcacgccgatgacgccgccggcggcgaccgaggcgcagcgcgaggcctggctgcgccgggtcgaagccatcgcgccggcgccggagttgccgatgaagatggcgctggccgaggtggccgagccgcgcttcgccaaccgccgccgggagctgcccgccgccatgtccgcggcgctgacggcgcgggcgcaggcgctcggagtcacgctgacttcgctgtgcatcgccgccttcgccgacacgctgcggctgtggacggcggcgcacgccttcacgctcaacgtgacttgcaacacgcgggcggagcaggcggggctggcgataggcgattacaccagcaacaccttgctgtcgctgagcgagcgtcacccctcgttcgccgccttcgcccaagcggtgcagcggcaagtgtgggccgatctggacgcgccctggtgctccggcgtgtcgatcctgcgcgagctgagccggcgcaacggcgcgcccgtgctgatgccggtggtgctgaccagcctgctgtccggcgacccggctgacgatctggccctgctggacggcgtcggccgcgtggtcgacatggccaatcccacgccccaggtatcgctgcacgccgtcctgggccggcgcggcgacaggctggtgctgatgtgggagtccgtcgcgcagctgttccccgacggcatggtggacgcgatgttcgaggtcttcctcggcgcgctggaaacgatggcgacggacgccgcggccgtggagcggccgacgctggcccggctcgcgccgcagcaggcggcgcggcgcgcggcggtcaacgccaccgcggcggagcgcgcgccgcgcaggctggaaacccccatcgtccaacaggcgcggatcgcgccggaggcggtggcggtcaggcagggcgggacgacgctgagctacggcgcgctgctgcgcgaggcggaagacatcgccggcgcgctgcggcaaagcggcgtggcgcgcggcgaggtggtggcggccattgtcgcgccggggccgcgcgcggtggcggcgctgctgggcattgtgatggcgggcgcggtctatctgccgatagagccgtcttggccggccgcgcgcatagaagaactgctcagcgaggccggcgcccgtctcgcgctgctgagcgcggcaggcccggcgctgccggtgcccgcgctgcgtctggaccagccgctgccgcgcggcgacgcgggtccggccgcggacctcgaggccggcgacgcggcctatgtgatcttcacctcgggttcgaccgggcggccgaagggcgtgctgatcgcgcacgaggccgcggcgaacaccatagacgacatcaaccaacgcttcgcggtcggcccggccgatcgcgcgttgtgcgtgtcctcgctggcctttgatttgtcggtctacgacatcttcggcctgctcgcggtcggcggcgaggtggtgttcccggcccgctcgcgcgatccggacgcgatggctcaggcgctcagcgacggcggggtcaccatctggaattccgtgccggcggtgctggaactgatgctggaagtgtccgcgccgcgttcgccgcatctgcgcctggcgctgatgagcggcgactggatcgcgcccggcctggccgggcggctgcgcgacgcgtttccggcgctgcggccgatcagcctgggcggggcgaccgaggtgtcgatctggtcggtggtgcatccgatcgcgcccgaggacgccgtgctggcgtcgattccctacggccggccgctgtccaaccagcaatgcttcgtgcgcgcgcccgacggccgggagcggccggacggcgtggtgggcgaattgctgctgggcggccgcggactcgcgctcgcctatctgggcaacgaggcggaaaccgagcgccgcttcttcatcgacgccgagggccggcgactctaccgcaccggcgatctcgcgcgctggcagccggacggcgagcttgaactgctgggacggatggacgggcaggtcaaggtgcagggctatcggatcgagctgggcgagatcgaggctgccgcgatgcgcgccggctgcctggcgcgcgccgtggcctcggtggcccggcgcaaggacgcgacggtgatccagctgcacgtggtggcgctgccggatcatcaaggcgacgtggtcgcggccgtgcgcactcagctggtgctgcacctgcccgcctatatgcagccgcatcacgtgatggtgctggacgccttgccgctgacggcgaacggcaaggtggaccgcgcgcgtctcgccgagctggcggccccggctcccgcgccggcgacgccggccgcggcggcgcggcgcgacgcttcgctggaggccacgatgctggccgccttcgccgaggtggttggcgtcgagatagatccgcggcagggcttcttcgacgcgggcgccacctcgatgcacatcgtgaggctgcgcgcgctgctggcatcgcgcggcgtcgcggtgcccccgctggtcgatttcttttcgctggccacgatacgggcgctcgccgagcgcgcagatacgggcgaggcggacctttccccaatgatggacgtcgacggcgcgcgcgcctatcgacagcgcgtacgcgcacgcaaggaggctttg

SEQ ID NO: 59 - DNA, 4674 bp, Chromobacterium haemolyticum
atgactgatgcaacacccgtagacgccgtagcgatcatcggcgcgagctgccgcctgcccggcgtcagcaccctggaacagttctggtcgatgatagccgacggccgggtcgcgatcgaacgcttcggcgcggatgcggcgcgccgcgaaggcgtgccggaaacggtgctggcccagcccggcttcgtcggcgccggcggtccgctggacggcgtcgatcaattcgacgcggcctatttcggcattccgccgtcgcaggcggcggcgatggacccgcagcagcggattttcctcgaatgcgtgcacgaggcgctggagcgcgccggtcacggcgcggcgcgcggcgcgcgtgtcggcgtctgggccggctcggccagcgtcgattatctcgtcgaccacgtgcgcgaccggctggatcgcgcgtcgcccaaccgctatctgcagcaatgggtgggcgtggacaaggactatctggccacccaggtcgcctaccggctcgatttcggcggcccggccatcagcttgcagaccgcgtgctcgacttccctcgtcgccgtggttcaggcgatgcagggactgctgagcttccagtgcgacttcgcggtggcgggcggcgtcagcgtcgccttgccgcagcggcaaggccatgtgtacgaggagggcagcattctgtccgcggacggcgcctgccgtccgttcaccacggacagcagcggcaccgtcttcggcaacggcgcgggcgtggtggtgctgcgccgcctggaggacgcgctggccgacggcgaccccatcatggcggtgattcgcggcggcgcggtcaacaacgacggcgcggccaaggtgggcttcaccgcgcccggcgggcgcgggcagcaggacgtgatccgccaggcgctggcgctcagcgaggtggacggcgcgtcgataggctatgtggagacgcacggcaccggcacggcgatcggcgacgaggtggaactggcggcgctgggcgcggccctgggccagcgttccgccgccgacgcgcgctgcgcgctgggcaccttgaaggcgaacgtcggccatctgaacgcggcggcgggcgcttgcgggctgatcaaggccgcgctggcggtggagcatgggcggattccggccgccgtcggcgcggaacgcgcgatagacgcgctgcgcggcgacgccggcttctacctgccgacggaaaccgcgccttgggacgcgccgcagcggcgcgccggggtcagctccttcggcatcggcggcaccaatgcccacgtgatcatagaagcggcgccgccgcgcgcgccgcgcgcgccgcgcacgccggacgtcgcgccgctcttgctgttgtcggcgcgcggcgaggccttgcccgcgttgtgcgcggactacgcggactttctcgacggtcatcccgagctgaggatagaagacgtttgcctgacggcggcgctggggcggcggcattgggagcagcgcgcggcgttccgcgccgaatcccgcgaggccttgatcgccgcgctgcgcgccttcgccgccggcgagccgagcgcggagacgatcgcggcggaagtgccggcgcgcgcgccggagctgagcttcgccttcggcggcgccgaggatctggatgcggtattggcccgcgtgcagctgtggcaggcgagcggcgtcgtgccggccagcgtgtgcgcgacggggagcggggtgttcgccgcggccttcgcggcgggcgcgctgagtcttgaggatgcgcggcagcgccgcgcggagcgcgccgtcgcgccgtcgctgttgtggatcagcgcggcctcgggcctgccgctggacagcgcggaggcggtgcgcgaggaactggccggcgcgggcacggcgcctggcgcggcggccgccgccgaggcgctggaagcggccggcgcggaatgggtgctggacttcggcgacacggcgctgggcgcgggcgctgccggcatggtttcgctcgatccggcctcgccggacgcgctggcgcggctgtggaccgcgggcctgacgctggagctgtcccagcattaccgcgacggcaaccgggtggtgctgccgacctatcccttccagcgccagcgtcactggatagaccgcgcgccgcgtttcctggcggcgggcgcgacgcccttccttggacggcgcaccgacgcgccggccttgggcgcgaccttcttcgacgccgaatggagcgtggccgtcttgcccttcctgcaggatcacgtgatttacgacaaggtggtggtgtccggcgcggcgctcgcggtgatgatggccgacggcgcgcgcgcgctcaccggatcggacggctgcgtgctgagcgatctgcgcttcccggccgcgctggtgattccgtcgggcgcggcgcgcaaggtccagctgcaattggtgcgcgacggcgacggtttcgaagccacggtgttgacgctggagtccgccgacgtccacgcgacggccagggtggacgccggcgaggcgccgggcgccgcgccggcggagccggtgcgcggagaagcgatctccaccgagctgctggatagctggctgcgcgcgcgcagcgtggtgatgggaccgaccttccggcgtctgtcggacatcgtggtcggggacggcgacgcgtcttgcgatatgcgggacgacgccgacgacgccggctggttgctgcaccccggggtgctggattcggtgctgcaactggtggccgccgccgcgcggcccgagggcagcaaggctttcgtgccgacgcgcatcgcgcggctggcgctgcacgggcggaccggcgccgggatgcgctgtcacgcgtcggccgagcgggggcaggccagcctgttcgacgccggcaaggtgctgctcgaaatgaccggcctggagtcgcgcgaggtgacccgcaatgaattgctgcgcgtcgaaccgctgcgcgagggctatgcggtggaatggcgcgacgcggcgggcggcgaggccgccgcgctgccggcgaccatcgccatcctgagcggagcgggggatacggcggcagggctggcggcgatgctgcgcgacgaaggcaaggaggccgtcgtggtggcggcggtgaacgatattcccttcgacaaggcgggcctgatcgtcgattgccgcgggctggaggcgcgcggcgacgcgccggcgccggcggtttacgccggggcgctggaactgttcgccacggccgcgcggcgcgagcggccttgccgcatcgccttggcgctggcgccggacgcgccggcctcggcgccgctgcaggcgctgtcgcgcgcggtggcgatggaaacgccgcatctgcagacgctggcgctgcacgcgggcgacgcgcgggcgatccgccgcggcctggattacttcgagcgcgagaccgaagtcgcggtcaagggcgaggcggtcgccgcgccgcgcttcgacgagcgcgcgctgccgctcagagcggacctcgcgctctcggcggacgccacttggctgattacgggcgggctgggcgaactcggcctgcgcgtcgcgagctggctggccgcgctgggcgcgcgcgccttggtgctgaccggccgccggccggccgacgccgcggccgaggcggcgctggccgcgctgcgccgcgacggcgtggaggtgaaggtgtggcaggccgacgtggcggcggaagcggacgtcgacgcgctgctggccgagatcgacgcgaccatgccgccgctgcgcggcgtctgccatctggcgggcgtggtggaggactgcctggtcggcgacgtcacgccggcgtcgctggccgccaccctggccggcaaggcccgcggcgcctggctgctgcatgagcgcaccctggcttacccgctggaacacttcgtgctgttttcctccgccgccgccgccttcggcgcgccggggcaatcgacctacgcgatggccaacgcctacctagacgcgctggccgcgcgccgccgcgcgcaagggctgcccgcgctgtccatcgcctgggggccgtggcaggacgtgggcatgctggcccgctccagcgccaacgccaagcggcggctcgcgcagctgggcatcggccagatcgaggccgaatgcggccgcgccactttcgagatcgcgctgggggcggacctgccggcccacctcgtgctgctgcccatcgattgggggcgcttgatcgagcaatggccgccgcatgtgccggccagccgcttcgccggcatcgccaccgcccagccgggcgcgggttccacctcctcggtcagcgagctgctggcgctgccggcggaggaaagacgacatcgtctgttccaactgctggccgaggacgccgcgctggtgaccggcacgccgctggcctcgctggaccccgagcgctcgctgttcgactacgacctggactccttgctgatcaccgatctgcgcgtgctgctggaaaagcgtttcggccgcgcgataccgaccacggtgattttctcgaatccgaccatagccgccttggcggaccatctggcgcggacggtgttcggcatggccgaggcggaggcgacgcccgccgcgcccgccgccgagcccgacgcgccggcggacgccgcgatgtcgcaggaggagatcgtggaaatgctgtccgcgaaactgaaggaactgaatagaaaggacgcgcga

SEQ ID NO: 60 - DNA, 3549 bp, Chromobacterium haemolyticum
atgagccagatcgacacgaccgcgctgatgcggaacgcgctgcgcgagatcgaacgcctgcagcgcgaactggacggcgccgaacagcgccggcacgcgcccatcgccgtggtcggcatgggctgccgtttcgccggcgtcgactcgccggaggcgctgtggcagcggctgctcgacggcgcggacggcgtgagcgaggtgccggccgagcgttgggacgtcgagcgctacttcgacgccgacccggacgcgagcggccgcatctactgccgcaccggcagctttttggacgatatcgcctccttcgacgccggcttcttcggcatttcggcgcgcgaggcggcgatgctggatccgcagcagcgcatgctgcttgaagtgagctgggaagcggtggagcgcgccggcatgacggcggcggaactgaagggctcggccaccggggtgttcgccggcgtcatgcatcaggactacgcgcaccgtttccgccgggcggaggaggtcgacctctacaccgcctcgggcaacgcgcccagcgtgctggcgggccgcgtgtcgcacgcgctcggcctgcacgggccgacgctgacgatagacaccgcgtgctcgtcgtcgctggtcgccgtgcacctggcttgcaacgcgctgcgcgccggcgagtgcgacatcgccatcgtcggcggcgtcaatgtggtgctgtcgccgctgtccaccgccgccgaatgccgggcgcacatgttgtcgcccagcggccgctgccgctccttcgacgacggcgcggacggcttcgtgcgcggcgagggttgcggcgtggtggtgctgcagcggctcgccgacgccgaggccgccgggcggaccatagacgcgctgatcgccggctcggcggtcaatcacgacggccgcagcgcgggcctgacggtgcctaacgagcacgcgcagcgcgagctggtgcgggcggccttgcgcgccgcgcgcatcgacgcgtcgcaggtgaattatatcgaggcgcacggcaccggcaccgcgctgggcgacccgatagaggcggcggccctggcctccgtgtttgccggccgcggccgcgaagagcgcgtgctgctgggttcgatcaagagcaatttcggccatctggaaggcgcggcggggattgccgggctgatcaaggcggcgctgacggtgcgccatggcgtggtgcccgccaccctgcatgtgcgcacgcccaaccgcggcatcgactgggacacgctgccgctgcgcctcgcgctcggcgcggaacgcatagacgccggcggcgcgccctgcgtcgccggggtcagctccttcggcttcagcggcaccaatgcgcatgcggtgctgctcgcgccgccgcgcgcggccgccggcgaaacggcggccggcgcggacgaaggcgcgcaattgctggtcgtttccgcgaaatccgacgcctcgctgcgcggcaacgcggcgcggctggccgcccatctggccgggctcgacgccgcggcgtgggcggccgcctgccacgcgtcgcgggcggcgcgctcgcatttcccgcatcggctcgcgctgacggcagccagcgcggaagagatggcgcgcgagctgagccgcttcgcgcgcggcgaggacgccgccgttcacagcggcgtgtgcggcgggatgccgcccagccgcgacgcgtcgccggagacggcggacgcgggacgcgaaccggccgagcggctggacgccttggcgcggcgctatgtggccggcctgccggtcgactggccgacgccggccggcgccgggcgccgcgtcgcgcggctgccgagctacgcatttgaccgccagccttactgggtggacgaagggcgggcgcaggcggagtcgccgctgtaccgcatcgcctggcagccgctgccggccccggccggcgcgcgccgctcgggcgagcgcatcgtcgccggcgatccggccttgtgcgcggaagtggcgcgcgggctggaagccgccggcgagcgctgcgcgattgcgcccgccgagatcgacgccatccgccgcgcgggcgacgccggcctggtgctcgccttcgaccgcgcggccggagacgaggacgcgctggcggccgtcgcgcgccgcggcgccttgctgagcgcgctggcgcgagagcgcgccgcgacgccgtcggcggcgccgatcacggttgtcacgcgcggcggagcggccaccgggccggcggaggaggtcgatcccgtcctcgccgccttgagcgcggccgtgcgcgtcgcgcggcgggaacagggccggagctggcgcggcacgatagatatcgacggctcgccggcgtccttcgacgcgctggcggccttgctcgccgatgaagccgccgaggagcaattggcggtgcgcggcgccaccgtgctggcgccgcggctgcggcgcgccggcgccagtaccggcgcgctccccgcgctggacggcgacgccgtctatgtggtgaccggcggcaccggcgccttgggcctcgccaccgcgcgctggctggccgggcgcggcgcgcgccatctgctgttgatcagccgcggcggcgaagccggcgcggcggcgcaggccgcttgcgcccgtctgcgcggcgacggcgtcgaggtccgcgtggcggccgccgacgtcgccgacgaggccgccttgcgcggggcgctcgccgcggccggccggccgatacgcggcgtcgcgcactgcgcgggcattgtgcgcgacgcgacgctggacgcgctggacgccgcggccttcgccgagaccctgcgcgccaaggtgggcggcgcggtcttgctggaccggttgaccgaggccgagccgctggacttcttcctgttgtattcgtccatctccgcggcggtcggccgtcacggccaggccgcctacgccgccgccaacggttatctcgacgcgctggcgcagcggcggcgcttgcgcgcgcggccggcgctgtccataggctggggatcgtgggcggccggcatgggcgcggccgacgcgaagacggcggaacggattcgcgccggcggcctgaacccgctgagcgagggcgaggccttcgccgcgctggaacgggagttcaccggcgagccgcatctggtggtggccgcgatcgatcttgcgcggatcgcggcgcagcccgatctgccgccgctgatcgaaggcctgatcggccgcgcgccggcggcgaatgcgcggaccctgtctttcgaccaactgcgcggccgtcccgccggcgagcgccgcgcgcgggtcgccgattatctggacgcggaactgcgcgcggtgctgtccagcccggccgccttgccgcgtcagacttcgctgctggatctgggcgtggactcgctgactggcgcggaactgcgcaacgcgcttgagcgcgcgctaggggtgtccgtcgcgatctcgcacctgatcgacggctcctcgctggacgaactgatcgaccaggtgatggcgcaactggagcgcaagctggtgacggaacaacattcggccgcgggcgccgacacggaggaaatcacgcta

SEQ ID NO: 61 - DNA, 9552 bp, Chromobacterium haemolyticum; identical to SEQ ID NO: 48

SEQ ID NO: 62 - DNA, 5715 bp, Chromobacterium haemolyticum
atgaacaaaacattatcaaacgccgcgcagcaagccggctcgaaagtcgagaccatgctgccgttgacgccgacgcagcagggcctgctgtttcatacgctgaaagcgccggagtccggcgtctattacgaacaggtcgcttgcgccttccaggtcgcgctagacgcggccgattaccggcgcgcgctggaagcggtgatcgcgcgccacggcgtgctgcgcaccggctttctgtgggacgggccatccaagccggtgcaggtggtcttccgcgacgtcgaactgccgtgggtggaggaggactggcgggctttcgatcccgaggagcagcggcggtgtctcgccgcctaccgggacgaggaccggcgtccaggctttcacctgagccgcgcgccgctgatgcgctgcgccttgttccgcaccggcgaagaacgctatgagttcgtgtggagctatcaccatctgctgctggacggctggtcggtgcagatcgtgctgggcgaagcgctcgcctgctacgacgcctaccggcgcggggccgatccggccttgccgccgccccagccctacagcgcttttctgcgctggctggaccagcaggacggcgcggcggccgaggccttctggcgcgagcggctgggggatgtgcgcgcggccacgcccttgccgctggcggaggaggccggcccggagcgcgcgtccggccacggcctgctggaacgcgagctggacccgcggacgagcgagggcctgcagcggctggcgcgcgcctgcgagctgacgcagagcacggtgatccaggccgcctgggccttgctgctggcgcgagcgagcggccgcgacgacgtggtgttcggcaccaccgtgtccggccggccggccgcgctgcgcggggtcgagcagatggtggggctcttcgtcaacgcgctgccgacgcgcgcgaccgtcgacgccgcgcagacgctgggcgactggctcagacagctgcaccgccggcatgtggacgccgaagcctacgcctatacgccgctgcacgcgattccgggctggagcggcgtggctccgggcgagcccttgttcgagagcctggtggtgttcgagaactatccggcgcgcgcggacgcgacgcgctatcgggaacggctgggcgtcggcgacgtcgaggtggtggaacagaccaactatccgctgaccgtggtcgcgattcccggcgagcgtctgcgcttgcgcctgcattacgatcgccagcgcgtctcggaggcgtcggcggagcggatcgtcgcgatgctggcgcggctgctggagcagttcgaacgcggcggcgccgcgctgcgcatcggcgaggcgtcgctgctgggtgcggaggcgggcggcgcgctggtcgcgggctggaacgcggcggcccggcgcgcggacgagacggcgcgccagtgcctgcatcgccgttttgaggcgcaggcgcgcgcgcggccggacgccgtcgcgctgcaatgcgagggcgaggcgctgacttacgccgaactggaccgccgcgccaaccggctggcctggcggctggacgccgccggcgtgcgcggcgacacgccggttgcgctggcgttcgggcgcggcgtggacagcatcgtcgcgatactggcggtgttgaaggcgggcgccttctatgtgccgctcgatctcgaccatccgccggaacgtctcgcctggatactggaggatatcggcgccggcgcgctgatttgcggcgaggaagcgcgcgagcgcttcggggacttcggtggggttctgatcgggatgggagatgcggcggagtccggcgagcgcgaagacgcgccgccgccgcgcgacacttcgcccgccgacctgtgctacgtgatctacacctcgggctcgaccggacagcccaagggcgtgtgcgtggagcaccgcaatgtggaccatctgttcgcggcgacgcgccggagctacggcatcggaccgtcggacgtgtggaccctgttccattcctacgccttcgacttctcggtatgggaaatctggggcgccctgctgcacggcgggcggctggaaatcgtgccttaccgctgctcgcgcacgccggaggagtttctcgcgctgctggagcgcgagggcgtcacgatgctgagccagacccccagcgccttcaagcagctgctgcgcgcgctgggcgacgcgcggcggcccttgccggccggcttgcgtcatgtgttcttcggcggcgaggcgctgattcccagccagttcgccgcctgcctgggcgaggagagcggcgtcgcgctggtcaatctctacggcatcaccgaaaccacggtgcacgtgaccgagcgcgtgctgggcgcgggcgacgcgctctcctcgcgcagcccggtgggccggcccttgcccggctaccgtatctacctgctcgacgccgccggacatccggtgccgccgggcgtgccgggcgaaatctacgtgggcggggagggcgtggcgcgcggttatcacaagcgtcccgagctcgaccgcgaacgtttcatcgccgaccccttcctgcccggcgagcggctttaccgcagcggggacctcgggcgctgggacgcggacggcgagctggactatctgggccgcatcgacgagcaggtcaagatccgcggcttccgcatcgaactgggcgaggtggaggcggcgctggcccggcacccggacgtcgccgccgcggcggtgatggtggacgaggcgagcatagacggccacgcgcagctggcgggtttcgcggcgccgcgcgagggcgcgtcgctctctcccgccgcgctgcgggactggctggcgcagcgcctgccgccgcacgcgattccggcgcgcctgatcgaggtggacgcgatcccgctgacccctaacggcaagctcgatcgccgctggctggccgacgcgctagcggcggacggcgacgcggcgcgtccgcacgtcgcgccgcgcgatgcggtggaacaggcgctggtcggcgtgttcgaatccgtgctcaagcgctcgccggtcggcgtcaccgacaatttcttcgagctgggcggggactccatcctgagcatccagatcctgtcggccgcgcacaaggtcggcatcgacttcacgctggacgagctgatgcgctcgctgaccatagcaaggctggcgccgcgggtccggcgcacggattcgccgccgccggccgcgagcgcgccgccgccgctgctggacgccgcctacgaggacgcctatccgctcagcgcgatgcagatggcgatgctggccaacgagatgcggcacggccaggactccgcctatcacaacgtcaacgatcagcggctggccctgcccttcgacgcggccgcgctcgaggcggcgttgcgcggcgccttcgaacgccatccggcgctgcgcaccgccttcgatctggccgccgacgaggagccgctgcagtacgtgcatcgccaagtgcccttgccgctggcggtcagcgactggcgaggcctggacgcggcgcggcaagacgcgcggattctggattggcgcgaggccgagcggcgccggcgctttgacgttgagcatccgccgctgatccgcttcgccgtgcatcgcctgagcgaggaggagatgcatatcggcgtgaccaagcaccacgcgattctggacggctggagcttcaacctgctgctctccgagctgatctcggactattcggcgcggctggccggccggccgctggcgctgacggcgcctgccagccgctaccgcgacttcgtcgagcgcgagcgcgaggcggcgcgttcggacgcgctgcgcgactggtggcgcgcgcggctgcaatccttgccggccacgcggctggcgcgggagccggacggcgacgcggcgccggcggaggtgccgatttcggccgctgagtccgccggcctggaagcgctcgccgcgcgcgcgggcgcctcggtgaagagcgtgctgctgacggcgcatctgctcgccttgtcgcgcatctgcggcaggccggaggtgacgagcggcgtggtgttcaacggccgcagcgagggcgcggacggcgaccgggtgctgggcctgttcctgaacagcctgccgctcggcttcgacttcccggccggcgtcttcgacgccgtcgcgctggtgcgcgcggtgcaggcggccgagctggaggtgttcagccgccggcgctatcccttgatcgaactgcatcggcaggtgggcacggtgttcgacgcgctgttcaacttcacgcacttccgcgcgctggaggacgcggtgcgcgacatcgaggtgtccgacggctacgcgagcgacacgaccaatgtgccgctggtggtgcaaagcagcttcgacggccggcaaggcgtattgcggatcaccctggtgccgtcgcgcgggcatttctcgacggagaccgtggtccgcttcgtcgcggagtacgcggcggccttgcgcgcgctgctcggggaaaccacggcgggggacgcggacgcaggcggcgcgagcagggcggacggcggcgagcgccggagcctggcctcggcggccgccacgccggcggcggccaaggcgcccgccgccgcgcggcccagcggcgcggcgttgcgacgcgagctgagcgccttgtggacggccgtgctcaagcgcgaaccgccgtcggaggacagcgatttcagcgcgctgggcggggattctttgctgatgctgcggatctgctcccgcgccggccgggcctttggcctggacgcggcggtggtggcccgtctgttgacggcgcagaccgtggccgagcaggcccggatcatcgagaccgagggcgcggacgcggacggcgtccgggtcggcgcgctcgtcgcgctgtccgcgccgggcgacgcgccgccgctgttcttcgcgccgggcgcgggcgggcatgtgccgtatctgcgcgcgctcgcggccgagctgtccaaggacttctcggtatggggcatggagctgcccgggtccggcgaggccgacgcgggcggcgtcgaagccatcgcgacggcgctgatcgccgacatccggcgggtgcggccttacgggccttatcgcctgggcggccattctttcggcggctgggtcgcgcttgagattgcgcggcaactggccggccagggcgaggcggtggcttgggtctccatcgtggacagcctgccgccggggtcggcggcgcggccgcacaagcgggactggcgggacagccgctggatggcggagatcggcaacagcttcgcgcgtctggccgacgccaagccgctattcgacgccgatgaattcgacgcgctggacgatgcgcggagagtggaacgtttgcgcgagcgcttgatagcggcgggcgtgctgccggaggagcttggcctgcccgagttcgcggcacgcgtgcgcgccttcatcgcgcattcgctgacggattacgcgccggcgacgccttatgccggcgcgctgcatttgattgtggccgcggacagggacggcgaggcggatgcgcccgacgccgccgcgctcatcgacggctggcgcgcggcggcgccggccgcggcgacgccgctgcgcctgcccggcgatcacgtcggcatcatgcgcccccccttcgtcagcgggctggccggcgccttgcgcgccgtggaggccgccgcgcggcgggtcgtttcagacatggaaaccgaggaagaacaa

SEQ ID NO: 63 - DNA, 1170 bp, Chromobacterium haemolyticum
atgaacaccagagtcaaggcattcgccgccgtcgaggcggcgctggcggaaccggaggcggcgctcgccaacggcgatttcgaaaccgtggaacagttgatgagcggcatccgcgcggccaaccgggcacacggcctgtggctgccgcaggtgccgcgcgccgacggcggcctgggcctgaacctgcttgagctggtggaggtgggcgagctgctgggcgcctcgccgctgggccattacgcggtcaactaccaggcgcccgacgccggcaatatcgacgtgctgctggagtacgcgactcccgcgcagcgccggcgctggctggagccgctattgcgcggcgagctgcgcagctgcttcgcggcgacggagccggagtccgccggatcgaatccctcctcgctgaaaacgacggcggtgtacagggacggcgcctggcatctgaacggccgcaaatggttcgcgtccggcgccgacggcgcgggcttcgccatcgtgctggccgtcaccgacgaggccgcgccgctgcacgcgcgcaccagcaccttcatcgtgcccgccgacgcgcccggcttccgccacgtccgcaatctgcgggtgatgggggacgagggctgcggctgggccagccacggcgaactggtgctggacgattgccgggtgggcgaggacgcgatgctgggcaagcccggcgagggcttcgtcgtgctgcaggccaggctcgccaccggacggctgcaccattgcgcgcgctggataggcgtgtgcgagcgcgccttcgccatcatgtgccggcgcgcctgccgccgggagctggcggcgggcgagctgctgtcctcgcgccagacggtgcagaactggatcgccgagagccgcgcgtcgatagacgccgcgcgcctgctggtgacccaggcggccacgcggctgcagaaccgtcatgagcgcgcgcagatcgacatctcgatcgcgaagttcttcgtggccggcgtgacgcagaccgtgctcgatcacgcgctgcaggtgcagggcgcgttgggcgtcagcggcgacacgattctcaatgtgctgtggcggcacgaacgcgcggggcggatttacgacggcccggacgaagtgcacaagagcctggtggcgcgccatgcgctggccggcttccggcgggagctggca

SEQ ID NO: 64 - DNA, 963 bp, Chromobacterium haemolyticum
atgagcgcgcggatcgcggagcgcgcgatggcggcgctgggccgcccccgcgtcggcgcgcgcgcgacgcgggtgggcggcggccgggccagcgaagtgttcctggtgcagggcggcgacagcgaactcatcgcctactggctgccggagggcggcgcgcgcgaggcgagacgccgctacgcgctgctggagcggctgtccggccagttccggctggcgcccaggccgctggcggtggacgaggacggcgacgccgcgctgctgctggttgaaaagctggacggcgtcgcgccggccgcctgcggagcgctcggccccgacaccgtgcgccggctcgcggaaaacttcattgagacgctggcgagcctgcatgcgctggaggtcgcgccggccgaccggccccccgactatctgcggcgcatcctgagtgaatggcggcggcgctggaacgcggaggaggcgggcgcggcggccgacgccgacttccgggcggtggccgactggctgagcgagcggatgccgcagaccgcgcccgccgcctggctgcacaacgattacaagctggacaacatcctcgtcgacccgggcgatccggcgcggctggtgggcgtcgtcgattgggagctggccgcggtcggccatccgctggcggatctcggcgccgcgctcgcttactggatagagggccgggattcgtcgttgctgcggctggacgcgcccgggccgagctgcgcgccgggcgcgccgacgcgcgcggagctggtggacctgtacgccgccgccaccggacgcgaggtgacggaacccgcctactggtacgcctacggcctgctgcggctggcggtgatcacgcaacaactggcgctgcggcgccgcgacgaagggcagcgcgtgccgcgcgccaagctgatcgtgcgctggctgctggaccgcgcggcggaagcctgcggcggcggccggctg

SEQ ID NO: 65 - DNA, 903 bp, Chromobacterium haemolyticum
atgaataccgaaacttccacgactgtattcgacgtcatcgtgatcggcggcagtcacgccggacaatccgccgccttgcagatcgcgcgcgcgcgccgccgcgtgctggtgatcgacgccggcgcgcgccgcaatcgcttcgtcgcccaatcccacggcgtgatcggcctggacgggcgctcgcccgacgcgatcgccgcggacggcaaggcgcaattgctggcctatcccaacgcgcaatggcgcgcggacaccgtggtccgggccgagagcggcgaggcaggctacgcgctgcgctgcgcctccggccaaagctacgcggcgcgccagctggtgctggccttcggcgtggtggacgaattgcctgagctggagggcctgcgcgagcgctggggcgaaagcgtgttccactgcccttactgccacggctacgaactgaagcagggccgcatcggcgtgctcggcggcggccccctgtcctatctgtcggcgatgctgatgccggaatggggcccgaccgtcttcctgagcgacggcggcttcgagccggacgcggcgcagcgcgaggcgctggcgcagcggggtgtcgacatcgtgcgcgaacggatcgcgcgcatcgtcgagcgcgccaccgtcgagctggccgatggccgccggctggcctttgacgggctgttcatgatgaaccgcttccgcctgtccagcccggtggcggagcagctgggctgcgtgatcgaggaggggccgctggggccttatgtgcggaccgacgacgcgatggagacatcggcgccgggcgtattcgcctgcggcgacatcacgcagcggggcggcaccgtggcgctggccatcggcaacggcgcgctggcgggcatcgccgcgcatcgcaaactggtgttcgga

SEQ ID NO: 66 - DNA, 1110 bp, Chromobacterium haemolyticum
atgtgcggaccgacgacgcgatggagacatcggcgccgggcgtattcgcctgcggcgacatcacgcagcggggcggcaccgtggcgctggccatcggcaacggcgcgctggcgggcatcgccgcgcatcgcaaactggtgttcggataagccgcgcgcgacggcagacttctttctcttcatgactggaaagcgattcatgagttggcaaaacctatgtttctcctggctgttgcgcagaacggccaaatccctgacccgcaagcccggcctgaccgcccaggaaatgcgcgagcgcagcgcgaaatgggcgcgcggcgaaatcaagccgccgcgcggctggcgggtgcgcaagctggacgcggaggcgctgcgcggcgagtggatagagcctgaagcctccgcgcggcgcgaggcgagcgggcgggtgatcctgtatttgcacggcggcggctattgcttctgctcgccgctgacgcaccggggcgtggccgccgcgctggcgcgggaggcggacgcgcgcgcgttttcgctggcttaccggctggcgccggaacatccgttcccggccgccgtcgacgacgcgctggcggcgtatcgggggctgttggacgagggcgtggcgcctgagcgcatcgtggtcgccggcgattcctccggcggcgggctggcgctggcgctgctgctgtcgctgcgcgacgcgggcgcgccgatgccggccggcgcggtcttgttctcgccgtggacggatctggcggcgaccggggcctcgctggaagcgaacgacgcgtccgacgtgatgctgagcgcggtggcggtgaggaatttctcgcgctactaccttggcgacgccgccgccgatcatcccatcgcctcgccgctctacggcgagtacgcgggcctgccggacctgttcatccaggccagcgacagcgaggtgctgctggacgacgccgcgcgcgtggccagcaaggcgagcgcggccggcgtcggcgtggatttcaaggtgtggcggcggctgccgcacgcctgggccaccctgacgccgatgctgccggaagcgagggcggcgatcaaagaagccggcggcttcatccgcaaggtggcgccg

SEQ ID NO: 67 - DNA, 597 bp, Chromobacterium haemolyticum
atgcatccgccggggcgggggcggcgctttcacgatccgctgcgctaccggctggatcagcaggccgacgaggcgacggacgcgatcgcgccgctgctggaccggccttacgccttgttcgggcacagcatgggggcgagcctggctttcgaggtggcccagcgggcgcgggggcgcggcctgccggcgccctgctgcctgatcgtgtccgggcgcgccgcgccgcatctgccgccgagagagcggccgatacacggtttgccagacgatgagtttctggacgaggtgatgcgcatgaacggcacgccggcggaagtgctggcccatccggaactggtccaggtcatcctgccggtgctgcacgccgacttcgaggcgatagagacttaccgtcccgcgccgcgtccccctttgagctgccgcatcgtcgccctgggtggcagcgaagaagagggcggcgtcgaggcggccgcttcctggcagggctatgccaccggcggttttcgcagcgagatcctgcccggcgatcacttcttcctgaacgggaggccggaaagcctgttcgcgatactgaaggaggagcttggccgcgctgtg

SEQ ID NO: 68 - DNA, 357 bp, Chromobacterium haemolyticum
atgcgctggcgaggcccgtccatcgcattttcccgacctaccgcgccagtccggcgcgccgaggagcacgccatgaattgtcccagttgccaagtcaccctgctgatgggcgaacgtttgtccgtcgccatcgattactgtccgcaatgccgcggcgtctggctggcgcccggccagctggagcgcctgctgcaaacccaggctccagcggcccccgccgccgcttacgcgccgtccgcgcacggtcgcggccatgacgacgaacaccgtcgggacagccgccacggaggccatcacggaggccatcacggaggccatcacggcggcaagcatggctggctgcgcaagctgctggac

SEQ ID NO: 69 - DNA, 465 bp, Chromobacterium haemolyticum; identical to SEQ ID NO: 56

SEQ ID NO: 70 - DNA, 1167 bp, Chromobacterium haemolyticum
atgcagagtaccatgttttctgagcgcatcgaacggctcagcgggtcgctgatccgggaaatcctggcggcggcgcaacagccgcagatgatttccttcgctggcggcctgccggccggccaatgcttgccgcagctcgatttcaccgatatgccggcgggcctggcgcaatacggcgccagcgaaggcgagccggaattgcgcggcttgatcgcggagcaggcgcggcgcatgggcatcgcttgcgaggcggagcaggtgttggtgctgtccggctcgcagcagagcatcgatttgtgcgccaagctgttcatcgatcccggcacgccggtggtgacagaggggccgacttatctagcggccttgcaggctttcaagttgttcggcgcccgcgttcacgcagtggcgcaacgggacggcaggctggagccgcaggcgctggccgccgccttgagcgagtctcaggcgcgctgctcttatcttattcccagctttcaaaatccggcgggcagctgttacagcgccgaagaccggcaggcgctggcggccgtcatcgacgccgccggcgtgcccttgatcgaggacgatccttatcgcgcgctcagctacgacggcgaagcgccggcgccgctggtcagccatttgaagcgcgcgccgtggatttactccggctccttttccaaaaccctggcgcctgggctgcgcgtcggcttcctgatcgcctcgccggagctgtatccctatctgatgcggctgaagcaggcgaccgatctgcacaccaaccgcccggcgcagtggttcatcgcccgccagctgagcgaccccggccatgagcaacggatgttggccttgcgcgaggtgtatcgcgccggccgcgacgcgatgcaggattcgctgcagcggcatttcggcgatttggccgattggcagttgccgcggggcgggctgtttttctggctcaagctgaagcggacgagagatacccgcgctttgctgccgctggccttgaagcagaacgtcgcctttatgccgggcgaggccttcttccctgagccggaacagaacctgggctatctgcgcctgaatttcagccatgcctcgccggagcggatcgagatcggcatcgccagactggcggccttgctgcgggataccgccgccgcggag

SEQ ID NO: 71 - DNA, 5085 bp, Chromobacterium haemolyticum
atgtattcctcatccgatgcctcatcgcggcggacatccgccggcgaccagttcggacctcatcctgctttttcgcaccgcgaagcgctgagcattgcccggcagctgatgtcgcgggcggaagcgagtcccgaccgtctcgcgtacgcgtccgccgatccggcgaaaaacgtcgcgctgagctacgcggcgctgtgcgaacgcgcgtccgccgtcgccgcgcgcctggcgcaagcgagccaggcgggagaccgcgtgatgctggtctatcaggagcccctcgatttcattccggccttcttcggctgcagcctggccggggtgatcccggtgccggtggcgccgcgccacggccgcgacaccatgctcgcgatcgccaaggactgcggcgcggccatcgcgctgacggccgaggcgcgcgacgcgctgccgggcctgcgctggatgcgcaccgacgaggccgagcgcgccgccccctttctgcgggccgcggacgacggcagcccggcgctcttgcaatacacctcgggttcgacgcgcacgccgcagggcgtggtggtcacgcaatccgggctgtgcgcgacgatagacgatctcgaccgcggcgcgatgcacgacgcggacagcgtgatgatcagctggctgccgtactttcacgacatgggcctggtgtacggcattctcacccccttgcaatgcggctttcccgcctatctgatggcgccggagaaattcgtcgcccagcccatgtcctggctgcgcgcgatagacgcgcggcgcggcacccacaccgccgcgcccaatttcgcttacgccttgtgcgcggaccgcgcggcggatctcgcgcccggcaccgatctgtcgtccctgcgctacgcgctgaacggcgcggagccggtgcgctgcgacacggtgcgccgtttcgaggcggccttcgcgccgtttggcttgagtccgtccgtggtggcgccgggctatggcctggctgaggcgaccttgaaagtgaccgccggccgttgcggcgaaggcacgcgcggcgtgcgtttcgggcgggaggcgctggcgcgcggccgcgtgtcgccgcaggccgacggcgttgaattggcggcctgcggcgcgagcctgatcgatacgcgcgtccgcatcgtggatccggacacgcgcgcgccgtgcgcgccggacgccgtcggcgaaatctgggtggcggggcgcacggtcgccgacagctactggcgccggccggaggagtcgcgcgagatcttcggcgcgcgtctggctgacggcgacggcgcctggttgagaaccggcgatctcggctttctgcacgacggcgatctgttcgtcaccagccgcttgaaggatttgatcatcgtcggcggccggaatttctacagccacgatctggaggacacagtgtcggcctgccatccgtcgattcggaaggggcgcgccttcgccgccgccgtcgacggcgaggagggcgaagggattctgatcggcgccgaggtgcgcggcggctgcggggaggcggaagcccgcgacattctgcctatgattcgcgcggcgctggcgcgggaacacggcgtggcgccggcgcgcatcgcgctgctgcggcgcggcagcatcctgcgcacctccagcggcaagacccggcgcggcgccacccgcgacgcgctgctgcgcggcgaattgagcattgtcgccgacgacgcggtcggcgcggccgacgacgcgattctcgccgagattgcgcgcttcgtgcccggcgcggcggcggcccccgaggcccggctgatcgatctggggctggattcgctgtcggccgcgcggctcgccgccgcggcgcgcgcgcgccacggcgtggaattgtcgttcgcggcgctgttcgcgctcacggccgaacagctgaggcgcgagatcgccgccgccccgcgcgtggacgccgcggcgccggtcgcggcgcggcgctacgcggcgggggagccgttcgaattgtccgagatgcagcaggcctactggataggccagcagggcggcgtgccgctgggcagcgtgtcgccgcacatccgcgtggacttcgagatcgacgccgcgcgcgcgccggaactgggtcgacgcctcgcgcggctggtcgcccgccatccgtccttgcggatgacggtgggcgcggacgggcgcggcgccttcgacgctctcgcctacgatcccttgctgccgccgcaggatctgcgcgggctggacgcggcggaggcggccgaacggctggaggcgacgcgggcgagcctggccgagcgcgacgggccgccgctggtcgcggcggtcacccgtctgacggacggcgcggccatcctgcacatgcggctcagcctgttggccggcgatctgcgcagcttcctgcaattgatggcggaactggcgcgcggcgcgtctgatgatcccccggcgcagttcatcgcgccgctgacgccgccggcgatccccgacgcgcatcgagaggcctggttgcgccgggtcgagtcgatcgcgcccgctcccgagctgccgatgaagatggggctggccgaagtggccgagccgcgcttcgccgtccgccgccgggaactgccggccgcgctgtccgccgccttgacggcgcgcgcgcaggcgctcggcgtcacgctgacttcgctgtgcatcgccgccttcgccgacgcgctgcggctgtggacggcggcgcacgcgttcacgctcaacgtgacctgcaacacgcgggcggagcaggcggggcaggctataggcgactacaccagcaacgccttgctgtcgctgagcgaaagccacgagtccttcgccgcgttcgcgcaggcggtgcagcggcaagtatgggccgatctggacgcgccgtggtgctccggcgtgtccatcctgcgcgagctgagccgccgcaacggcgcgcccgtgctgatgccggtggtgctgaccagcctgctgtccggcgacccggcggacgatctggccgtcctcgacggcatcggccgcgtggtcgacatggccaatccgacgccgcaggtgtcgttgcacgccgtcctcggccgccgcggcgacaggctgctggtgatgtgggagttcgtcgcccaattgttccccgagggcatgatggacgcgatgttcgacgccttcctcggcgcgctggaaacggtggcgagcgaagcggcggcggcggagcggccgacggtcgcccggctcgcgccgcaacaggcggcgcggcgcgcggcggtcaacgccaccgcggcggagcgcgcgccgcgccggctggaagcccccatcgtccggcaggcgcggatcgcgccggaggcggtggcggtcaggcagggcgagaccacgctgagctacggcgcgctgctgcgcgacgcggaggacatcgccggcgcgctgcggcaaggcggcgtcgcgcgcggcgacgtggtggcggccatcgtcgcgccggggccgcgcgcggtggcggcgctgttgggcatcgtgatggcgggcgcggtctatctgccgatggagccgtcctggccggccgcgcgcatcgaggaactgctcggcgaagccggcgcccgtctggcggtggtggacgagggcggccgggcgctgccggtgccggcgttgcgcctggacctgccgctgccgcgctgcgcttgggagccggcggcggaggcggcggccggcgacgcggcctacgtgatcttcacctccggctcgacgggacggccgaagggcgtgctgatctcgcacgaggccgcggccaacaccatagacgacatcaacgagcgcttcgcggtcggcccggccgatcgcgcgctgtgcgtgtcctccctggccttcgacttgtcggtctacgacatcttcggcctgctcgcggtcggcggcgagctggttttccccgagcgcgcgcgcgatccggaggcgatggcccaggcgctgcgcgacggtcgggtcaccatctggaattccgtgccggcggtgcttgagctcttgctggacgtggccgcgccgcgttcgccggatttgcggctggcgctcttgagcggcgactggatcgcgcccgggctggccgggcggctgcgcgaggcgtttcctggcctgcggccgatcagcctgggcggagcgaccgaggtgtcgatctggtcggtggtgcatccgatcgcgccggaggacgcggtgttggcgtcgattccctacggcaggccgctgagcaatcagcaatgcttcgtgcgcgcgccggacggccgggagcgtccggacggcgtggtgggcgaactgctgctgggcggacgcggcctcgcgctcgcctatctgggcaacgaggcggaaaccgcgcgccgcttcttcgtcgacgccgagggccgcaggctctaccgcaccggcgatctggcgcgctggctgccggacggcgagctcgaactgctggggcggatggacgggcaggtcaaggtgcagggctaccggatcgaactgggcgagatcgaggccgccgcgatgcgcgccggctgcctggcgcgggcggtggcctcggtggtccggcgcaaggacgcgacggcgatccagctgcacgtggtcgcgcggccggattacgacggagacgtcgtcgcggcggtgcgcacccagctggtgctgcatctgcccgcctatatgcagccgcatcacgtgacggtgctggacgccttgccgctgacggccaacggcaaggtggaccgcgctcgcctcgccgcgctggcggccccggcgcccgcgccggcgcagccggccgccgcgacgcggcgcgacgcctcgctcgaggcgacgatgctggccgccttcgccgaggtggtcggcgtggagatagacccgcagcagggcttcttcgacgcgggcgccacctcgatgcacgtggtgcgcctgcgcgcgctgctggcgtcgcgcggcgtcgcggtgccccccttggttgacttcttttcgctggccacgatacgggcgctcgccgagcgcgccgacgcgggcgacgcggatctttccccgatgattgacgtcgacggcgcgcgcgcctatcgacagcgcgtgcgcgcacgcaaggaggctttg

SEQ ID NO: 72 - DNA, 4668 bp, Chromobacterium haemolyticum
atgacttatcccacacccgtcgacgccgtagccatcataggcgcaagctgccgcctgcccggcgtcgccaccctggaacagttctggtcgatgatcgccgacggccgggtcgcgatcgagcgcttcggcgcggacgcggcgcgccgcgagggcgtgccggagacggtgctggcccagcccggcttcgtcggcgtcggcggtccgctggacggcgtcgatcaattcgacgccggctacttcggcataccgccgtcgcaggcggcggcgatggatccgcagcagcgcatcttcctggagtgcgtgcacgaggcgctcgagcgcgccggtcacggcgcggcgcgcggcgcgcgcgtcggcgtctgggccggctcggccagcgtcgattatctggtcgaccacgtgcgcgaccggctggaccgcgcgtcgcccaaccgctatctgcagcaatgggtgggcgtggacaaggattatctcgccgcccaggtcgcgtatcggctcgacttcggcggcccggccatcagcttgcagaccgcgtgctcgacgtcgctggtcgccgtggtccaggcgatgcaggggctgctgagcttccagtgcgatttcgcggtggcgggcggcgtcagcgtcgccctgccgcagcggcagggccatgtgtacgaggagggcagcatcctgtccgcggacggcgcctgccgtccgttcaccgccgacagcagcggcaccgtcttcggcaacggcgcgggcgcggtggtgctgcgccgcctggaggacgcgctggccgacggcgatcccatcatggcggtgatacgcggcggcgcggtcaacaacgacggcgcggccaaggtgggcttcaccgcgcccggcgggcgcgggcagcaggacgtgatccgccaggcgctggcgcttagcgaggtggacggcgcgtcgatcggctacgtcgagacgcacggcaccggcacggcgatcggcgacgaggtcgagctggcggcgttgggcgcggcgctgggccagcgcgccgctgccgacgcgcgctgcgcgctcggcaccttgaaggccaatgtcggccatctgaacgcggcggcgggggtctgcgggctgatcaaggccgcgctggcggtggagcatgggcggattccggccgccgtcggcgcggagcgcgcgatagacgcgctgcgcggcgacgccggtttctacctgccgacggaaaccgcgcgctgggacgcgccgcagcggcgcgccggcgtcagttccttcggcataggcggcaccaacgcccacgtgatcatagaagcggcgccgccgcgcgcgccgcgcgcggccgacgtcgcgccgctcttgctgttgtcggcgcgcggcgaggccttgcccgcgctgtgcgcggactacgcggactttctcgacggccatcccgagctgagggtggaggacgtttgcctgacggcggcgctggggcggcgtcattgggagcggcgcgcggcgttccgcgccgaatcgcgcgaggccttgatcgccgcgctgcgcgccttcgccgccggcgagccggatgcgggcgtgatcgcggcggaaacgccggcgcgcgcgccggagctgagcttcgccttcggcggcgcggccgatctggacgcggtgctcgcccggcttgagctgtggcaggcgagcggcgtcgttccggccagcgtgtgcgcaacgggggacggcgtgttcgccgcggctttcgctgccggcgcgctgagcctggccgacgcgcggcaacgccgcgcggaccgcgccgtcgcgccgtcgcggctgtgggtcagcgcggcctcgggcctgccgctggacagcgagcaggcggtgcgcgaggaactggcgcgcgcgggaacgatggtcggcgcagccgacgccgccgccgcgttggaggcggcgggcgcggagctggtgctggacttcggcgacgaggcgctgggcgcgggcggagccggcatggcgtcgctggatcccgcctcgccggacgcgctggcgcggctgtggaccgcgggcgtgacgctggacctggcccagcattaccgcggcggcaaccgggtggtcttgccgacctatcccttccagcgccagcgtcactggatagaccgcgcgccgcgcttgctggcggcgggcgcgacgcccttcctcggccggcgcaccgacgcgccggcgctggacgccaccttcttcgacgcggaatggagcgtggccgccttgcccttcctgcaggaccacgtgatttacgacaaggtggtggtgtccggcgcggcgctggcggtgatgatcgccgacggcgcgcgcgagctcaccggatcggacgcctgcgtgctgagcgatctgcgcttcccggccgcgctggtgattccgccgggcgcggcgcgcaaggtccagctgcagctggtgcgcgacggcgacggtttcgaagccacggtgttgacgctggagtccgccgacgtccacgcgacggccagggtggatgccggcgaggcgccgggcgccgcgccgtcggagccggcgcgcggagaagcgatctccgccgaactgatggacagctggctgcgcgcgcgcagcgtggtgatggggccgaccttccggcggctgtccgacatcgtggtcggggacggcgacgcgtcttgcgacatgcgctccgacgccgacgacgcgggctggctgctgcatccggggatactcgattcggtgctgcagctggtggccgccgccgcgcggcccgagggcagcaaggccttcgtgccgacgcgcatcgcgcggctggcgctgcaggggaggaccggcgccgggatgcgctgtcgcgcgtcggccgagagggggcaggcctgcctgttcgacgccggcaaggtgctgcttgaaatgaccggcctggaatcgcgcgaggtcacccgcaacgaattgctgcgcgtcgagccgctgcgcgagggctacgcggtggaatggcgcgacgcggcgggcggcgaaccggccgcgctgccggagtccatcgccatcctgagcgacgcggggcaggcggcggcggggctggccgcgatgctgcgcgacgaaggcaaggaggccgtcgtcgtggcggcggtggctgacattcccttcgacaaggcgggcctgatcgtcgattgccgcgggctggaggcgcgcggcgacgcgccggcgccggcggtttacgccggcgcgctggaattgttcgcgacggccgcgcgccgcgagcggccgtgccgcattgctgtggcgctggcgccggacgcgccggcctcggcgccgctgcaggcgctgtcgcgcgcggtggcgatggaaacgccgcatctgcagacgctggcgctgcatgccggcgacgcgcgggcgatccgccgcggcctcgattgcttcgagcgcgagaccgaagtcgcggtgcggggcgaggcgatcaccgcgccgcgcttcgacgagcgcgcgctgccgctgcgggcggacctggcgttatcggagaacgccacctggctgatcaccggcgggctcggcgagctcggcttgcgcgtcgccggctggctcgccgccttgggcgcgcgcgccttggtgctgaccggccgccggccggccgacgccgccgccgaggcggcgctggccgctctgcgccgcgacggggtggaggtgaaggtatggcaggccgacgtggcggtggaggcggacgtcgacgcgctgctggccgagatcgacgcgacgctgccgccgctgcgcggcgtctgccatctggcgggcgtggtcgaggattgcctggtcggcgacgtgacgccggcctcgctggccgcgaccctggccggcaaggcccgcggcgcctggctgctgcatgaacgcacgctggcgtatccgctggagcacttcgtgctgttctcgtcggcggccgccgccttcggcgcgccggggcaatcgagctacgcgatggccaacgcctatctcgacgcgctggccgcgcgccggcgcgagcaagggctgcccgcgctgtccatcgcctgggggccgtggcaggacgtcggcatgctggcccgctcgagcgccaacgccaagcggcggctcgcgcagctgggcataggccagatcgaggccgagtgcggccgcgccaccttcgagatcgcgctggcggcggacctgccgccgcacatggtgttgctgcccatcgattgggggcggctgatcgaacaatggccgccgcatgtgccggccagccgcttcgccggcatcgcctccgcgcggccgggcgcgggctcgacctcctcggtcagcgagctgctggcgctggctccggacgagcggaggatccggctgttccagctgctggcggaagacgccgcgctggtgaccggcaccccgttggcctcgctggaccccgagcgttccttgttcgactacgacctggactccctgctgatcaccgatctgcgcgtgttgctggaaaagcgtttcggccgcgcgatcccgaccacggtgattttctcgaacccgaccatagccgcgctggcggaccatctggcgcggacggtgttcggcgcggccgaggcggaggcgacggccgccgcgcccgccgccgagacggacgcgccggcggacgccgcttcgctgtcgcaggaggaaatcgtggaaatgctgtccgcgaaactggacgaactgaatagaaagggcgcgcga

SEQ ID NO: 73 - DNA, 3549 bp, Chromobacterium haemolyticum
atgagccaaatcgacacgactgcgctgatgcggaacgcgctgcgcgagatccagcgtttgcaaggcgagctggacggcgccgaacagcggcggcacgcgcctatcgccgtggtgggcatgggctgccgcttcgccggcgtcgattcgccggaggcgctgtggcggagtctgctcgacggcgcggacggcgtcagcgaggtgccggccgagcgctgggacgccgcgcgctacttcgacgcggacccggacgcgagcggccgcatctactgccgcaccggcagcttcctggacgacatcgcctccttcgacgccggcttcttcggcatctcggcgcgcgaggcggcgatgctggatccgcagcagcgcatgctgctggaggtggtgtgggaggcggtggagcgcgccggcatgacggcggcggaactgaagggctcggccaccggggtgttcgcgggcgtcatgcatcaggactacgcgcaccgcttccgccgggccgacgacgtcgatctctacaccgcctcgggcaacgcgcccagcgtgctcgccggacgcgtgtcgcacgcgctgggcctgcacgggccgacgctgacgatagacaccgcctgctcgtcgtcgctggtcgccgtgcacctggcgtgcaatgcgctgcgcgcgggcgaatgcgacatcgccatcgtcggcggggtcaatgtggtgctgtcgcccttatccaccgccgccgagtgccgcgcgcacatgctgtcgcccagcggccgctgccgttccttcgacgacggcgcggacggcttcgtgcgcggcgagggctgcggcgtggtggtgctgcagcggttcgccgacgccgaggccgccgggcgcagcatagacgcgctgatcgccggctcggccgtcaatcacgacggccgcagcgcgggcctgacggtgccgaacgagcacgcgcagcgcgagctggtgcgggccgccttgcgcgccgctcgcatcgacgcgtcgcaagtgcgctatgtcgaagcgcacggcaccggcaccgcgctcggcgatccgatagaagcggcggcgctggcctccgtgttcgcgggccgcgagcgcggggagcgcgtgctgctgggctcgatcaagagcaatttcggccacctggaaggcgcggcggggatagccgggctgatcaaggcggcgctgacggtgcgccatggcgtcgcgcccgccacgctgcacgtgcgcacgcccaaccgcggcgtcgagtgggacgcgtcgccgctgcggctcgcgctgcgcgcggaacgcatagacgccggggacgagccctgcgtcgcgggcgtcagctccttcggcttcagcggcaccaacgcgcacgcggtactggtcgcgccgccgcgcgaggccgccggcgcaagcgcggcgagcgcgggcgaaggcgttcaactgctggtcgtctccgcgaagtccgacgcttccttgcgcggcaacgcggcgcggctggccgaccatctggccggactcgacgcctcggcctgggcggccgcctgccacgcgtcgcgcgtcgcgcgttcgcatttcccgcatcggctggcgttgacggccgccgacgcagaggagatggcgcgcgagctgggccgctttgcgcgcggcgaggacgcggctgtttaccgcggcgtctgcggcggaatgccgttcggccgcgacgcgacgccggtcgaagcggaggcggagaaggagccggccgaacggctggccgcgctggcgcggcgctacgtggccggcctgccgcttgattggccggaggcggccgtcggccgccgcgccgcgcgcctgccgacctacgccttcgaccggcagcgctactgggtggacgaagggagagcggtcgaggagtcgccgctgtaccgggtggcctggcagccggtgccggccccggccggcgcgcgccgctcgggcgagcgcatcgttgccggcgatccggctttgtgcgcggaagtggcgcgcgcgctggaagccgccggcgagcgctgcgtgatcgcggccgccgagatcgacgccatccgccgcgcgggcgacgccggcctcgtgctcgctttcgaccgcgcggccggagacgaggacgcggcggcggccgtcgcgcgccgcggcgccttgctgggcgcgctggcgcgcgagcgcgccgcgacttcgtcgacggcgccgatcaccgtcgtcacgcgcggcggagcggccgccgggccggcggaggacgtcgaccccgtcctcgccgccttgaacgcggccgtgcgcgtcgcgcggcgcgaacagggccggacctggcgcggcgcgatcgatatcgacggctcgcaggcctccttcgacgcgctggcggcgctgctcgccgacgatgcggcggaggaacaactggcggtgcgcggcgccgtcgtgctggcgccgcggctgcggcgcgcgggcgccgggacggccgacgcgctgccggcgctggacgccgacgccgtctacgtggtgagcggcggcaccggcgcgctgggcctcgcgaccgcgcgctggctggcgggccgcggcgcgcgccatctgctgctgatcagccgcggcggcgaaaccggcgacgccgcgcaagccgcttgcgcccgtctgcgcggcgacggcgtcgaggtgcgcgtggtggcggccgacatcgccgacgaggccgccttgcgcggcgcgctcgccgcggccggccggccgatacgcggcgtcgcgcactgcgcgggcgtggtgagggacgcgacgctggacgcgctggacgcagcggccttcgccgagaccttgcgcgccaaggtgggcggcgcggtcttgctggaccggctgaccgaggccgagccgctcgatttcttcctgttgtactcgtccatttccgcgacggtaggccgccacgggcaggccgcctacgccgccgccaacgcttatctcgacgccttcgcgcagcggcgcagcctgcgcgcgcggccggccttgtccataggctggggctcgtggacgacgggcatgggcgcggccgacgcgaaaacggcggagcggattcgcgcaggcggcctgaacccgctgagcgaaggcgaagccttcgccgcgctggagcaggcgttcgcgggcgagccgcaccgggtggcggcggcgatcgatcttgcgcggatcgcggcgcagcccgatttgccgcgcctgatcgaaggcctgctcggccgcgcgccggccgagcgcgcgcggactctttctttcgaccaattgcgcggccgcccggccggggagcgccgcgcgctggtcgccgattatctggacgccgaattgcgcgcggtgctgtccagcccggcggccttgccgcgtcaggcctcgctgctggacctgggcgtcgattcgctgaccggcgcggaactgcgcaacgcgcttgaacgcgcgctgggcgtgtccgtcgcgattacgcatctgatcgacggctcctcgctggacgagctgatcgatcaagtcatggcgcagctggagcgcaggctggtgacagaacaaagctcggccgtcggcgccgacacggaggaaatcacgcta

SEQ ID NO: 74 - DNA, 9609 bp, Chromobacterium haemolyticum
atgcgcgacagcttgcggcttcacgtcctgcagcaagccatctttaggtgcgacatgaacgacaacgccgtttctccctcccgcgatccgcatacccaggccgcgtcggccgaaaccttcgccgccctgttcgcccgcagcgcggcggaccacccggacgccattgcgctgcggcacggcgcgcgcgcgctcagctaccgcgaactggacagccaggccaaccgcctggcccattatctgcgcgagctgggcatagatcgcgaaacgccggtgggactctgcctggaccgctcgcccgagcagatcatcgccatgctggccgtcttcaaggccggcggcgtctatctgccgctggaccccgattatccgcgcgagagactggcctacatcctcaacgacgccatgccggccgccttgctgacgcgcgccgcgctgaccgagcagttgccggcccactgggcgcgggtggtggagctggataccgagcagccagcctggcaggcgcaaccggaccacccgcctctgcggcatgactcgccggaccagctggcctatgtgatctacacctcgggctccaccggccagcccaagggcgtggcggtcacccaccgcggcatcggcgcgctggcgcgcgcccagagccagcgcttcggcatcgcccccggcgcccgcgtgctgcagttcgcctcctccagtttcgacgcggccttctccgaaatcgccatgaccctgctctccggcgcctgcctggtcaccgcgccggcggcggaagtgacgccgggcgcggcgctggcggacttgctcgcccgccagcggatcagccacctgacgctgccgcccagcgcgctggccctcatgccggacggcggcatcccgcaggattgcggcctgatcgtcgccggcgaggcctgcccggcggcccaggtgcggcgctggtccgccggccgaaccatgctcaacgcctacggccccaccgaagccaccgtgtgcgcgacgatgagcggccggatgcgggacgaggcgcccgccgacatcggcgcgccgctgcccggcgtccaggcttacgtgctggacgacgccctgcggccgctgccgccgggcgtggaaggcgagttgtatcttgccggcgacgggctggctcgcggctatctgggccggccggcgctcagcgccgagcgcttcgtcgccaaccccttcggccccgccggcagccgcctctaccgcagcggcgacctggcgcggctgcgcgccgacggcgcgctggattatctggggcgagccgacgaacagctcaagctgcgcggctaccgcatcgaacccggcgaaatcgaacacctgctgacgcagcaggccggcgtgagccaggccgtggtccgcctgcgcgaagacctgcccggcatcaagcaactggtcgcctacgtcgtttcccgcgccggtctgcaagccgacggcgcggccttgcgcgcggcgctggccgagcaactgccggactacatggtaccggcggcggtggtgccgctggagcgtctgccgctgacccccaacggcaaggtggacaaacaggcgctgcccgcgccggacttcggcgacgccgacgccggcgaagcgcgggactggctggagaaaacgctggccaagctgtacgcggaagtgctgggcctgcccagggtgggcctgggccagggcttcttcgacctcggcggcgacagcatcagcgccattctgctggtcagccgcgcccgcgcccacggcctgcagttcagcccgcaggacgttttcgatcagcccagcatcgagcgcctggcgctccgggtccgcccgctggaagccgacgcggcggccggcgaattgccgccgcccagcgccgcggatatggaaagcatccgcgaccgctatccggcggccagcgcggtgctgccgctgtcgccgctgcagcggggcctgctgttccacctgctgtacgacgaaggtcaaagcgacgtctacctgatacagatgggcttccagctggacggcccgctggacgcggccaggctgcgcgccgccgccgaaggcttgctgcaacgccatcagcacctgcgcgcggccttcgccgcggacgggctggaacagccggcgcaaatcgtgctggagcgcgtggagacgccgtggcgcgagctggatctgtcggcgcaccgggccgatgaacagcagcgcgccctggaacggctgcgcgaggacgactacgccgccggcgtggacccggcgcgcgcgccgctgctgcgctttaccctgatcaagctggacgccgagcgccatcagctgctgtggagcttccaccacctgttgttcgacggctggtcggtgccggtgctgctgcgcgaactgttcgccctctaccgcggcgacgagctgccgcccgccattccctaccgcgactacctggcctggctgcacgtccgcgaccgcgacgccgccaaacgccaatgggtcaaccatctggcggacctggaacagccgacgcgcctggcgcccggcggacaaaaaagccggcagttgccgcgcaaccacaatgtgacggcggacccggcggtctacgccatgctggagcggctggcccgccggcagggcctcaccctcaacaccttgctgcaagcggcttgggccatcctgctcgcccgcctcagcgcctgcgacgacgtcgtcttcggcgtcaccgtctccggacgcccgccggagctgcccggcgtcgaacgcatggtcggcctgctgatcaacaccgtcccgctgcgcctgcgcctgcggcccgaggaaaccctcgccgccctgctgcaacgcctgcaggcccagcaggccgcgctgatcgagcatcaacacctgagcctcgccgagatccagcaggcggccggcctgggcgatttgttcgacaccctgctggtatttgaaaactacccgatcgccgacgacgatcgccgcgttgacgacgcgctgtccatcggctacctgggcggccagggcgtggatacctcgcactatccgctcagcctgtgcgccgtccccgggcccgaactcgagctgcgcttcggctaccggcccgacctcttctccgccgacgccgtcgacggcatcgcccggcaactgctggaactgctgcgcctgatcgccgaacagcccgaactgccgctcgccagcatcgcgccggccaccccggcccagcaagacgcgctggccgcctggaaccgcaccgacgccccgctgcccgtcgccaccctgacccagttgctggaacgccaggctgaactccgccccgacgccgaggcgctgcgcttcgacgacatcgccctcagctaccgccagttgcatcagcgcgccaaccgcctcgcccgccgcctgcgcgccgacggcgtcggacccgaaaccctggtcgccgtcgcgctgccccgctccatcgatctggtggtggccctgctcgccgtgctcaaggccggcggcgcttatctgccgctcgatctcgactatccggccgagcgtctcgccttcatgctggccgacgcccagcccgccgtggtcctgtcccgctccgagctgctggccggtctgccggtcgaacgcgcgctgtgcctggaccagatcgacgccgcactcgagacgctgtccgacgcgccgctggaactcgacgacaatgacgaacacccggcctacgtcatctacacctcaggctccaccggccgccccaagggcgccgtcaacagccaccgcgccatcgtcaaccgcctgctgtggatgcagcacgcctacccgctggccgccgacgacgtggtgctgcaaaaaaccccgtccagcttcgatgtctcggtctgggaattcttctggccgctgctcgccggcgcctcgctgctgctggcccggcccgacggccatcgcgatcccgcctatctggccgagttgattcgacgccgcggcgtcaccaccctgcatttcgtcccgtccatgctggacgccttcctgctggagcccgccagcgccggctgcgtcagcctgcgccgcgtgctgtgcagcggcgaagccttgcccgcgccgctgctggcccgcgccgcccaaacgctgccctgtccgctgcacaatctctacggccccaccgaggccgccgtcgacgtcaccgcctggacctgcgacccggcgcgcgacagccgttcggtgcccatcggccacccgatctggaacacccagctattcgtgctcgattccatgctgcggccgctgccgcccggcatccccggcgagctgtacctcggcggcgtcggcctggcgcgcggctatctgcgtcgtccgggcctcaccgccgagcgcttcgtcgcccatcccttcgccgtcggccagcggctgtaccgcaccggcgaccgcgtcgtccgccgcgacgacggcgcgctggaatacctgggccgcctcgaccatcaggtcaagctgcgcggcctgcgcatcgagctgggcgagatcgaagccgcgctgctggaccagcccggcgtcgcccaggccgtggcgctgatccgcgaagacgcgcccgggcaacgccggctggtcgcctacgcggtgcccgccgccggcgccgaagccgacgtcgtccgctggcgcgacgcgctggccgcccgcctgcccgactacatggtgcccgccgcctgggtggcgctggacgcgctgccgctgacgcccaacggcaagctggaccgccgcgccctgccggcgccggagctgacgctggccgaacaccgcgagccggtcaccgagaaagagaaactgctggccgaagctttcgcccagaccctgggtctggagcgcgtcggcctcgacgacagcttcttcaacctcggcggcgacagcatcagctccatccagctggtgagcctggcccgcaagcgggggctgagcctgacgccgcgccaggtgttcgaacagcgcagcgtccgcggtctcgcccaggtcgcgaccgaggccgctgctcttgccgtcgagccgcgcgccgacgcgcccttgctgcggctggagccggccgaaatcgagcgcctgagccgccgccaccccggactcgccgaactgctgccgctgacgccgctgcagcaaggcctgctgttccacgcgctgtacgaccactccgccgccaacccctatgtggtgcagatgcgcatcgaactggacggcgcgctggacgccgccgcgctgcgccgcgccggcgaaggcctgctgcgccgccacccgcacctgctggcctccttcattcaccacgacaccttgcagccgatgcaggcgctgagccgggactccgccgcgccatggcgggaaaccgatctgtcggcgctgagcggcgacgacgcgcgcgcgcggctggaagacatgcagacggccgatcatggagagagcatgccgccggaccgcgggccgctgctgcgcttcaccctgatccggctggcgccggagcgccacctgctgctctggaccttccaccacctgctgctagacggctggtcccttcccgtgctgctggaagagctgttcgcgctctaccgccagggggaggcggccgcgctgccgcccgcgccggcctaccgcgattatctgcgctggctatccggccgcgatcaaaccgccgctcgccaggcctggagcgaatacctgcgcggcgtggacgagcccaccctggtggcgccgggcctccccgccgccgagcggcggccggatctgcacaccgccgcgctgtcgacggaactcagcgccgcgctggccgcccaggcgcggcgtcgcgggctgaccctcaacaccctggcccaggccgcatggggcctgctgctggcccgcctgaccggccgcgacgatctggtgttcggcatcaccgtgtccgggcggaccgcgccgctggaagacattgcgcggctgccgggcctgctgatcaacaccgtgccgctgcgcctgaagctggagccgtcggccaccttggccgactgcctggacgatctgcaagcgcgccaggcggcgatgatggagcaccagcatctcggactcggcgacatccaacagctgacggacatggaggaattgttcgacaccctgatggtgttcgaaaactatccgcaactcgacgcgctacgccaaaaccgcgccggcgacggcctgagcgtgcgtcccgtcgacgggctgggcggcgacgtgtcgcattacccgctgggcctgtgcgtggtgccgggggaaaggctggaactccggctgggctgccgcgccgacgccttcccgccggcggcggccgagcgcctcctcgccagcctgtcgcgcctgttccaggcgctggccggcgacctcgacctgccgctgtcccgcctgcgctggctggacgaggccgagagccgccagctggacggctggaacgccaccgcgcgcgccacgccgtcggcgacgctgcccgagttgttccgccgacaggccgagctgacgccggacgccgtcgcggtctgcgccggcgaccttcgcctgagctaccaccagctggaccggcaatccaacgcgctggcccaccggctgcgcgcggccggcgtggccgcggaaacgccggtggcgctgtggctgcaacgcggcccgctgctgccggtggccatcctgggcgtgctcaaggccggcggctgctatgtcccgctgcacaccgcccagccggaagaacggcgagcctggaccctggcccagtcgcgcgccgcgctgctgctggccgacgaggccccggcgccggcgatgctgccgccgggcttgccggtgctgcggatagacgactggtcggacaacgccgagcacccgccgcgcctggccctgtcgcccgacgcgctggcctatgtgatgtacacctccggctccaccggcgtgcccaagggcatcgccgtcagccacgccaacgtcagggatctggcgctggaccgccgctgggaaggcgcgtcccagagcaaggtgctgctgcactctccgcatgccttcgacgccgccacctacgagctgtggacgcccttgctgcacggcggccaggcgacgctggcgccgccgggggacaacgacatcgactcgctggcgaacaccctgcaaggggaaaacgtcaccgcggccttcctgaccaccgcgctgttcaacctgctggtcgaggagcggccggactgcttcgccagcctgcgcacgctgtggaccggcggcgaggccgcctcgctgcgcgccttccagcgggtgcgggagcgccatccgcaactggagctggtccacgtctacggccccaccgagaccaccaccttcgccacctgccatccgctgccgcgcgatcaggcgctgactgcgccgctgccgataggcgcgcctatggacaatacccgcgcctatgtgctcgatgccgcgctgcgcccgctgcccgtcggcgcgcccggcgaactctacctggccggcagcggcctggcgcgcggctatctggatcagccggcgctcagcgccgagcgcttcgtggccaaccccttcggccccgccggcagccgactctaccgcagcggcgaccgggcgcgctggcgcgccgacggccagctggaattcctcggccgcgccgatcagcaggtcaagctgcgcggcttccgcatcgaactaggcgaaatcgaggccaggctgcgcgagcacccggccgtgtcgcaggcgcgggcggtgctgcgcgagacggacggcgcgccgcgccagctgctcgcctatgtcgcgctccatcccggcgccgatgtctcgccctccgcgctcaggcaggccctggcggcgcaactgcccgactatatggtgccggccgccgtcgtcgcgctggacgcgctgccgctgacccccaacggcaagctggaccaccgcgcgctgccggctcccgagctccaggccggcggcgatcggcggccgccgcgcagcgacgccgaacgcatcctggccgggctgtacgccgagctgctgggcctggacggagtcggtctggacgacggcttcttcgatctcggcggcgacagcatcgcctccatcctgctggtcagccgcgcgcggcggcaaggcttgctgctgagcccgcgcgaggttttcctccatccccgggtggaagcgctggccgccgtcgcccggcctgtcgcctccgtcgcggccgaggacgccgcggaaggcccgctgccggcgacgcccatcatccgctggtggctggaacgcggcggcccgcaaggcggcttttaccaatccatgctgttgcaaacccccgcaggactggaacaagcccatctgacgcaggcgctgcaagccttgctggataaacacgacgcgctgcggatgcggctggacgtcgacggcggcctgagcgtgcctccggtcggctcgacatcggcgcaagattgcctgcgccgcatcgcggcggacgcgcacctggagatcccgccggccgacatcgccgccgcggcgcggcagttggaccccgccgccggcgccatgctgcgggcgctgtggctggacgccggcccggacgcgccgggcaggctgtggctcggcatccatcacctggcggtggacggcgtctcctggcgcattctgctgccggacctggcctccgcctggcgcgacgtccaggccggccggcccatccagctcgatccggtggccacctccttccgccgctgggcgctgctgctgaacgaggacgccgtccgcgccgcccgcgcggccgaagcgccgatgtgggcgaacatccagagccagcccgatccgctgttgtcgccctgcccgctggacccggcgctggacaccgccggcgccagccgacgcctgagcgtcgcgctgcccgccgccgtcaccgccgagctgctgacccgggtgccggcgctgttccacgccggcatcaacgacgtgctgctcaccggctttactctggcggtggcgcgctggcggcaagaccagggacggagcgacggcaccgcggtgcgcctggagctggaaggccatggccgcgaagagctgggcgagcattgcgacctctcccgcaccgtgggctggttcaccagcctgttcccggtccgcctcgatcccggcgtctccgccgccgcagccctggacgacgccgccgtgctgggcgacgcgctgaaacgggtcaaggagcagttgcgcgcgctgccggaccgaggcctgggatacggcctgctgcgctacctcaatccggagaccgcctcccggctgagcggcgccgcgccggcgcagctcggcttcaactacctgggacgcttcgccacgccggcgcgcggcgactggatgccggcgccggaagccgccggactggacgggaacagcgatccttcggtgcccttgtcccacgccatcgagctcaacgccgccacccacgacggcgcggacggcccggaactggtggccacctggctgtgggccggccgcctgttcgaccggcaggagatagcaaggctggcggaggactggttcgacgcgctgcgcgccttggccaagctgggccacgcgccggacgtcggcggcagcacgccgtccgaccatcccctggccggcgggttgtcgcaggaggagatagacctgatcgaagccggcctc

SEQ ID NO: 75 - DNA, 6600 bp, Chromobacterium haemolyticum
atggccggccaagaccatgtcgtaccaggcctggtcgcggcggctgtgggagtgggcggaggccctgccggaatcgacgctggactactggcgggagatggacgcgccggggatgtccctgcccggcgtcggcgcgggcgaggacacggtggcggcggagtcgcgcgtgtcgctgcagtgggacgcggagacgacggaacgctggttgcggcaggcgggcgaggcctaccggatgcgtccggaggaattgctggtggcggcgctggcgcgcgccttgcgccgatggacgggcgcagaggaatgcgtgctggacctggaaggccatggccgggacgggctggcgggcgtggacgtgtcgcgcaccgtgggctggttcaccagcctgtatccgttgcggctgccgcaaagcggcgagctgtcgcgcgagttgaagtcggtgaaggagaggatgcgcggggcgccggacggcggcatcgcttaccacgcgctgcgctacggcgggcggggggcggagctgggcggccatgcgcgcacggtgtgcttcaactacctgggccaatggcgtctggacgagggcggcgagccgcgcgcgacatggctgggcgagccgccgggcgggacgcgctcggcggggatgacgcggcgctacgcgctggacgtggtggcgcaggtgcacgagggccggctgcgggtggactggctgtacaacgcggcgcggcaagagcagggcgcggtcgcggcgctggccgagggtttccgcgccgagctggacgcggtgctggcgcattgcctgtcgccgcagtcgggcggcttgacgccgtcggacctgccgctcgcccatctggaccaggacgatatcgacgaagtgttacagctactgaacgaacagtcatgaaccaaacattatcgaatgccgcacagcaagcccgctcgaaagtcgagaccatgctgccgttgacgccgacgcagcagggcctgctgttccatacactgaagtcgccggattccggcgtctattacgaacaggtcgcctgcgccttccacgccgcgctagacgccgccgattaccggcgcgcgctggaagcggtgatcgcgcgccacggcgtgctgcgcaccggctttctgtgggacgggccgtccaagccggtgcaggtggtcttccgcgacgtcgagctgccgtgggtggaggaggactggcgacagttcgaccccgaggaacagcagcgccgcctcgccgcctaccgcgacgcggaccgacgtcccggctttcacctgagccgcgcgccgctgatgcgctgcgccttgttccgcaccggcgagcagcgctacgagttcgtgtggagctatcaccatctgttgctggacggctggtcggtgcagatcgtgctgggcgaagcgctcgccttctacgacgcgctccggcgcggcgcggcgccggcgctgccgccgccccagccgtacagcgcctttctgcgctggctggacgagcaggacggcgccgcggccgaagccttctggcgcgcgcggctgggcgatgtgcgctcggccacgcccttgccgttcgccgacgaggcgagcccggaccgcgcgcccggccacggcctgatcgaacgcgaactcgacccgcggacgagcgagggactgcagcggctggcgcgtgagtgcgagctgacccagagcacggtgatccaggccgcctgggcgctgttgctggcgcgggcgagcggccgcgacgacgtggtgttcggcaccaccgtgtccggccggccggccgggctgcgcggcgtcgagcagatggtggggctcttcgtcaacgcgctgccgacgcgcgcctccgtcgacgcggcgctgacgctgggcgactggctgagacagctgcatcgccggcacgtcgacgccgaagcctacgcgtatacgccgctgcacgcgattccggcctggagcggcgtcgcccccggcgcgcccttgttcgagagcctggtggtgtttgagaactacccggcgcgcgcggacgcgacgcgctaccgcgagcaactgggcgtcagcgacgtcgaggtggtggaacagaccaattatccgctgaccgtggtcgcgattcctggcgagcgcctgcgcctgcgcctgcatttcgaccgccagcggctcacgcaggcgtcggcggagcgtatcgtcgaaatgctggcggaagtgctgggccagttcgaacgcggcggcccggcgctgagcgtcgcacgggcctcgctgctcggcgacgaggcgggccgcgcgctggccgcgcggtggaacgcggaggcccgacacgcggacgatgcggagcgccagtgcctgcatcgccgcttcgaggcgcaggcgcgcgcgcggccggacgccgtcgcgctgagctgcgacggcgagacgctgacttacgccgagctggatcgccgcgcgaaccggctggcgtggcggctggacgcggccggagtgcgcggcaacgcgccggtggcgctggcgttcgggcgcggcgtggacagcctcgtcgcgatcctggcggtgctgaaggcgggcgcctgctatgtgccgctcgatctcgaccatccgccggaacgcctagagtggatactggacgacatcggcgccgtcgcgctgatctgtggcgccgaggcgggcgagcgcttcggcggtttcggcggcgcgcgtatcgggatgggcgaggcgcaggcgtcgggcgaaggcgaggacgcgccgccgccgcgcgagacctcgccgacggatctttgctatgtgatctacacctcgggctcgaccggtcagcccaagggcgtgtgcgtcgagcaccgcaatgcggaccacctgttcgcgtccacgcgccggcgctacggcatcgggccgtcggacgtgtggaccctgttccactcctacgccttcgatttttcggtgtgggaaatctggggcgccctgctgcacggcgggcggctggaaatcgtgccttaccgctgttcgcgcgcgccggacgaatttctcgcgctgctggagcgcgcgggcgtcacgatgctgagccagacccccagcgccttcaagcaactgctgcgcgcgctggacgaggcgcggcggcccttgccggccggcttgcgccatgtgttcttcggcggcgaggcgacgatacccagccagttcgccgcctgcctgcgcgatgcgggcggcgtcgcgctcgtcaatctctacggcatcaccgagaccacggtgcacgtgaccgagcgcgtgctgggtccgggcgacgcgcagtcctcgcgcagtccggtgggccggcccttgcccggctaccgcgtctacctgctcgacgccgccggccacccggtgccgcccggcgtgcccggcgaaatctacgtgggcggagagggcgtggcgcgcggctatcacaaccgtgccgagcttgaccgcgagcgcttcatcgcggacccgtacctgcccggcgcgcggctttaccgcagcggggacctcgggcgctgggacgcgcgcggcgagctcgactacctgggccgcatcgacgaccaggtcaagatccgcggcttccgcatcgaactgggcgaggtggaggcggcgctggcccggtatccggacgtcgccgccgcggcggtgatggtcgacgacgcgaccctggacggccacgcccaattggcgggctttgtggtcgcgcgcgagccggcgcgcgtctccggcgccgccttgcgggactggctcgcgcagcgcctgccgccgcacgcgattccggcgcggctgatcgagatggacgcgattccgctgaccaacaacggcaagctcgatcgccgccggttggccgacgcgctggcggcggacggcgcagcggcgcgtccgcacgtcgcgccgcgcaacgcggtggagcaggcgctggtcggcgtgttcgagtccgtgctcaagcgctctccggtcggcgtcaccgacaacttcttcgagctgggcggcgattccatcctgagcatccagatcctgtcggccgcgcacaaggtggacatcgatttttcgctggaggatctgatgagcgcgctgaccatagagcggctcgcgccgcgcgtccgccaggcgggctcggcgccggccgccgcgagcgcgccgccgccgctggaccccgcgtacgaggacgcgtatccgctgagcgcgatgcagatggcgatgctcgccaacgagatgcggcacggccaggactccgcctatcacaacgtcaacgatcagcgtctggccctgcgcttcgacgcggccgctctggaggcggcgctgcgcggcgccttcgagcgccatccggcgctgcgcaccgccttcgacctggccgccgaggaggagccgctgcagtatgtccatcgccgggtgcccttgccgctggcggtcagcgactggcggggcctggagccggcgcggcaggacgcgcggattctcgattggcgcgaggccgagcggcgccggcgcttcgacgtcgagcgcccgccgctgatccgcttcgccgtgcatcgcctgagcgaggacgagctgcatatcggcgtgaccaagcatcacgcgattctggacggctggagcttcaacctgctgctctccgagttgatttccgactactcggcgcggctggccgggcggccgccggcgcttgcggcgccggcgagccggttccgagagttcgtcgagcgggagcgcgaggcggcgcgttcggacacgctgcgcgattggtggcgcgcgcggcttcaagccttgccggccacgcggctggcgcgcgagccggacggcgacgcggcgccggcggaggtgccgatctcggccgcgcagtcggagcgcctgcaagcgctcgccgcgagcgcgggcgcctcggtgaaaagcgtgctgctgacggcgcatctgctcgccttgtcgcgcatcgccggcgcgccggcggtgacgagcggcgtggtgttcaacggccgcagcgagggcgtagacggcgaccgcgcgctgggcctgttcctgaacagcctgccgctaggcttcgatttctcggccggcgtcggcgaccccgccgcgctggtgcgcgcggtgcaggcggccgagctggaggtcttcagccgccggcgctatcccctgatcgagctgcataggcaggccggcacggtgttcgacgcgctgttcaacttcacgcatttccgcgcgctggaggaggcggtgcgcgacatcgacgtttccgacggctacgccagcgacacgaccaatgtgccgctggtggtgcaaagcagcttcgacggccggcgaggtgtgttgcggatcagcttggcgccgtcgcgcgggcatttctcggcggcgaccgtcggccgcttcgtcgcttgctacgcggacgcgctgcgcgcgctgctcggcgaatccgcgccggcggaaccgggcgcggaaatcttggccgagaacaaggcggacggcggcgagcgcaggagcgaggcctcggcggcggcgacgccggccgcggtcaaaccgtccgccgcgtcgcggccccgcggcgcggcgctgcggcgcgagctgggcgcgctgtgggcggcggtgctcaagcgcgatccgccgtccgacgacagcgacttcgtcgcgctgggcggcgattcgctgctgatgctgaggatttgctcccgcgccggccgggctttcgggctggacgcgcgggtggtggcccgcctgctgacggcgcagacggtggccgagcaggcccggatcatagaaaccgacggcgcgggcgaagacggcgcccgggtcggcgcgctggtcgcgctgtccgcggccggcgacgcgccgccgctgttcttcgcgcccggcgcgggcgggcatgcgccgtatctgcgcgcgctggcggcggagctgcccaacgccttctcggtctggggcatgacgctgcccggacccgatgacgacggcgcgggcggcgtcgaagccatcgcgacggcgctgatcgccgatatccggcgggtgcagccctacggcccgtaccggctgggcggccattccttcggcggttgggtcgccttcgagatcgcgcggcaattggccgggcagggcgaagcggtggcttgggtcgcggtggtcgacagcctgccgcccagtcccgcggcggcggcgcgcagggaagactggaccgacggccgctggatcgcggaaatcggcaacagcttcgcgcgcctggccgacgtcgggctggcgttcgcagaggaggagttcgacgcgctggacgaggcgcggcgggtggagcgtttgcgcgagcggctgatcgaggcgggcgcggtgccggaggaactgggcttggccgaattcgcggcgcgcgtgcgcgccttcatcgcgcattcgcagaccgactacgcgccggagacgccttatgcgggcgcgctgcacttgatggtcgccgccgatcaggacggcgacgcggccggcggcgacgcgctcatcgacggctggcgccgggcggcgccggccgcggcggcgatccgcctgccgggcgaccacatcggcatcatgcggcatccgttcgtcagcgggccggccgccgccttgcgcgccgccgaagccgccgcgcgccgcgccgtttcagtgaaggaaaccgaggaagaacaa

SEQ ID NO: 76 - DNA, 1170 bp, Chromobacterium haemolyticum
atgaatacacgagtgaaggcattctccgccgtcgaggcggcgctggcggaaccggaggcggcgctggccaacggcgatttcgaagccgtggagcggctgatgagcggcgtccgcgaggccaaccgaatgaaaggcctctggctgccgcaggtgccgcgcgccgacggcggcctgggtctgagcctgctggagctggtcgaggtcggcgagctgctgggggcctcgccgctcggccattacgcggtcaactaccaggcgccggacgccggcaacatcgatgtgctgcttgaatacgcgaccccggcgcagcgccggcgctggctggagccgctgttgcgcggcgagctgcgcagctgcttcgcggcgacggagccggagtccgccggatcgaatccctcctcgctgaaaaccacggcggtgttcaaggagggcgcctggcgtttgagcggccgcaaatggttcgcgtccggcgccgacggctcgggcttcgccatcgtgctggccgtcaccgacgaggccgcgccgctgcacgcgcgcaccagcaccttcatcgtgccgaccgacgcgcccggcttccgccgcgtccgcaatctgcgggtgatgggcgacgagggctgcggctgggccagccacggcgaactggtgctggacgattgccgggtgggcgaagacgcgatgctgggcaaacccggcgaaggcttcgtcgtgctgcagtcccggctcgccaccgggcggctgcatcattgcgcgcgctggataggcgtgtgcgagcgcgccttcgccatcatgtgccggcgcgcttgccgccgggagctggcggcgggcgagctgctgtcctcgcgtcagaccgtgcagaactggatcgccgagagccgcgcgtcgatagacgccgcgcggctgctggtgaaccaggcggccacgcggctgcagaaccgccacgaacgcgcgcagatcgacatttccatcgctaaattcttcgtggccggcgcgacgcagaccgtgctcgaccacgcgctgcaagtgcagggcgcgctgggcgtcagcggcgacacgattctcaacgtgctgtggcggcacgaacgcgcggggcggatctacgacggcccggacgaagtccacaagagcctggtggcgcgccatgcgctggccggcttccgccgggagctggcg

SEQ ID NO: 77 - DNA, 936 bp, Chromobacterium haemolyticum
atggcggcgctgggccgctccggggccggcgcgcgcgcgacgcgcgtcggcggcggccgggccagcgaagtgtttctggtgcagggaggcgaccgcgagctcatcgcttactggctgcctgagggcggcgcgcgcgaggcgcggcgccgcttcgcgctgcttgagcggctggccggccagttccggctggcgcccaggccgctggcggtcgacgacggcgaagacgccgccctgttgctggtcgaaaagctggacggcgtcgcgccggctgcctgcgggcagctcgcgccggacaccgtgcgccggctcgcggaaaacttcatcgcgacgctggcgagcctgcatgcgctggaggtcgcgccggccgaccggccccccgactatctgcgccgcatcctgggcgagtggcggcggcgctggaacgcggaggaggcgggcgaggcgctggacgcggattttcgcgcggcggccgactggctgacggcgcggctgcccgagaccgagcccgccgcctggctgcacaacgactacaagctggacaacatcctcgtcgatccgggcgatcccgcgcgcgtggtgggcgtcgtcgattgggagctggccgccgtcggccatccgctggccgacctcggcgccgcgctcgcctactggatagagggccgggattcttcgctgctgcggctggacgcgccggggccaagctgcgcgccgggcgcgccgacgcgcgcggcgctggtggacctgtacgcggccgcggccgggcgcgaagtgccgtctcccgcctactggtacgcctacggcctgctgcggctcgccgtgatcactcagcaactggcgctgcggcgccgcgacgaagggctgcgcgtgccgcgcgccaagctgatcgtgcgctggctgctggaccgcgcggcggaagcctgcggcggcggccggctg

SEQ ID NO: 78 - DNA, 903 bp, Chromobacterium haemolyticum
atgcattccgatacttccccaagcttcttcgacgtcgtcgtgatcggcggcagtcacgccggacaatccgccgcgctgcagatcgcgcgcgcgcgccgccgcgtgctggtgatagacgccggcgcgcgccgcaaccgcttcgccgcccaatctcacggcgtgatcggccaggacggacgctcgcccgacgcgatcgccgcggacggcaaggcgcagctgctcgcctatcccaacgcgcaatggcgggcggacgccgtggtccgggcgcagcggaccgacgccggcttcgcgctccgctgcgcctccgggcaagactacggcgcgcgccagctggtgctggccttcggcgtggtggacgaactgccggaactggaaggcctcagcgagcgctgggggctgagcgtgttccattgcccttactgccacggctacgagctggaccgcggccgcatcggcgtgctcggcggcgacgccttgtcctatctgtcggcgatgctgatgccggaatggggaccgaccgtgttcctgaccgacgacggcttcgaaccggacgaggagcagcgagaggcgctggcgcggcggggcgtcgagatcgtgcgcgagcggatcgcgcgcatcgtcgaccgcgccgccgtcgaactcgtcgacgggcgccggcttgagttcgacggcctgttcacgatgaaccgcatccggctgtccagccccgtcgcggagcagctgggctgcgcgatcgaggaggggccgctggggccttatgtgcggaccgacgacgcgatggagacttcgacgcccggcgtgttcgcctgcggcgacatcacgcaccgcggcggcaccgtggcgctggccatcggcaacggcgcgttggcgggcatcgccgcgcatcgcaagctggtgttcgcc

SEQ ID NO: 79 - DNA, 1107 bp, Chromobacterium haemolyticum
atgtgcggaccgacgacgcgatggagacttcgacgcccggcgtgttcgcctgcggcgacatcacgcaccgcggcggcaccgtggcgctggccatcggcaacggcgcgttggcgggcatcgccgcgcatcgcaagctggtgttcgcctgagacgcgcggcggcgcgccttcctttctattcaccggaaatcgatcaatgagctggcaaaacgtatgtttctcgtggctgttgcgcagaacggccaaatccctgacccgcaaaccaagcctgaccgccgaggaaatgcgggcgcgcagcgcgaaatgggcgcgcggcgaggttaaaccgccgcgcggatggcgggtgcgcaagctggacgcgcgggcgctgcgcggcgagtggatagagccggagtccgccgcgcggcgcgaggcggccggccgggtcatcctgtatctgcacggcggcggctattgcttctgctccccgctgacccaccgcggcgtggccgccgcgctggcggtggaggcggacgcgcgcgcgttttcgctcgactatcggctggcgccggaacatcccttcccagccgccgtcgacgacgcgctggcggcgtatcaggcgctgttggacgagggcgtggcgcccggccgcatcgtggtcgccggcgattcgtccgggggcgggctggcgctcgcgctgctgctgtcgctgcgcgacgcgggcgcgccgttgccggccggcgcggtcttgttctcgccgtggacggatctggcggcgaccggggcgtcgctggaggcgaacgacgcgtccgacgtgatgctgtcggccgtcgcggtgaggagtttctcgcgttattacctcggcgacgccgcggccgaccatccgatcgcctcgccgctctacggcgagtacgctggcctgcccgatctgttcatccaggccagcgacagcgaggtgttgctggacgacgccgcgcgcgtggcccgcaaggcgagcgcggccggcgtcgcggtggacttcaaggtgtggcggcggctgccgcacgcgtgggcgaccttggcgccgatgttgccggaggcgcgagcggcgatcagagaagccggcggcttcgttcgcaaggtggcgtcg

SEQ ID NO: 80 - DNA, 1533 bp, Chromobacterium haemolyticum
atggcgggtgcgcaagctggacgcgcgggcgctgcgcggcgagtggatagagccggagtccgccgcgcggcgcgaggcggccggccgggtcatcctgtatctgcacggcggcggctattgcttctgctccccgctgacccaccgcggcgtggccgccgcgctggcggtggaggcggacgcgcgcgcgttttcgctcgactatcggctggcgccggaacatcccttcccagccgccgtcgacgacgcgctggcggcgtatcaggcgctgttggacgagggcgtggcgcccggccgcatcgtggtcgccggcgattcgtccgggggcgggctggcgctcgcgctgctgctgtcgctgcgcgacgcgggcgcgccgttgccggccggcgcggtcttgttctcgccgtggacggatctggcggcgaccggggcgtcgctggaggcgaacgacgcgtccgacgtgatgctgtcggccgtcgcggtgaggagtttctcgcgttattacctcggcgacgccgcggccgaccatccgatcgcctcgccgctctacggcgagtacgctggcctgcccgatctgttcatccaggccagcgacagcgaggtgttgctggacgacgccgcgcgcgtggcccgcaaggcgagcgcggccggcgtcgcggtggacttcaaggtgtggcggcggctgccgcacgcgtgggcgaccttggcgccgatgttgccggaggcgcgagcggcgatcagagaagccggcggcttcgttcgcaaggtggcgtcgtgagccgcgagtggacgccggcgccgggcggcgcctgggtggacgccgcgccggcgggccggcaggcggcgctgcgcctgttctgctttccgtacgcgggcggcggcgcggcggtgttccggggctgggcggagcggctgccggccgcggtcgatgtccggcccatgcatccgccggggcgggggaagcggtttcacgatgcgctgcgctattgtctggatcagctggccgacgaggcgacggacgcgctcgcgccgctgctggagcggccttacgccttgttcggccacagcatgggcgcgagcctggcgttcgaggtggtccagcgagcgcaggcgcgaggcctgccggcgccggcgtgcctgatcgtttcgggacgcgcggctccgcacctgccggcgagggataagcctatccacgctttgccggacgagttgttcctggacgaagtgatgagaatgaacggcacgccgcccgaggtgctggagcaccccgagctggtcaagctgatgctgccggtgctgcgcgccgatttcgaggcgatagaaagctatcgccccgaaccgcgtccgccgttgaactgccgcatcgtcgctctcggcggcagcgaggaagagggcggcgccgaggcgacggcgtcatggcgcggctacagcaccggcggctttcgcggcgaaatgatgcccggcgaccacttcttcctgaacggcaggcccgagagcctgttcgcgctgctgaacgaggagcttggccgcgtcttg

SEQ ID NO: 81 - DNA, 345 bp, Chromobacterium haemolyticum
atggtttgcaatgcgcgagcgcggcctagcctgcgcatttcccgaaccaccgcgccgttgcggcgcgccgaggagcacgccatgaattgtcccagttgccaagtcaccctgctgatgggcgagcggctgtccgtcgccatcgattactgcccgcaatgccgcggcgtttggctggcgcccggccagcttgaacgcctgctgcaaacccaagcgccagcggcgccggccgccgcgtcttgcccgccggccgcgcacggtcgcggccatgacgacgaacaccgtcgcgacggccgctacggagggcatcacggcggcaagcatggctggctgcgcaagctgctggac

SEQ ID NO: 82 - DNA, 465 bp, Chromobacterium haemolyticum
atggctgacctatctccgtccgacgacatgcgcgccgccatggaagccttcttccatgcctacaaggctttcaccgacaaaccggatgaaatgctggccaaacgcggcctggctcgcgtgcatcaccgcatcctgttcttcgtcgcccgctatcccggcctgtcggtcaaggatttgctggccgcgctgggcgtgaccaagcaggccatcaatatgccgctgcgccagttgctggaaatggccttggtccaaagcgtggccgcgccgcacgacaagcgggtcaaacagctgacgctgacttcggaaggccgcaggctggaggaggccctgcaccgcgagcaactgaaattgctgcaaacggcgttcgagcagaccggcaagccggccaccaccggctggatgcagatcaaccgcagcctggccgcccactcccgccccgacgacgcgccctctcgcggcaaagct

SEQ ID NO: 83 - DNA, 1167 bp, Chromobacterium haemolyticum
atggagagtaccatgttttcggagcgcatcgaacggctcagcggctcgctgatccgggagatactggcggcggcgcaacagccgcagatgatctctttcgccggcggcctgccggccagtcaatgcttaccgcggctagatttcgccgagatgccggcgggactggcgcaatacggctccactgaaggagagccggaactgcgcgagctgatcgcggagcaggcgcggcgcatgggcatggattgcagcgccgagcaggtgctggtgttgtccggctcccagcaaggcatagatctgtgcgccaagctgttcgtcgatcccggcacgccggtggtgaccgaggggccgacctatctggcggccttgcaggccttcaagctgttcggcgcccgggtccacgcggtggggcagcgggacggcaggctggagccgcaggcgttggccgccgcgctggagcaggcgcggccgcgctgctgttatttgattcccagcttccagaacccggcgggcagctgttacagcgccgaagaccggcaggcgctggcggccgtcatcgacgccgccggcgtgcccctgatcgaagacgatccgtaccgcgcgctcagctacgacggcgaagcgccggcgccgctggtcagccatttgaagcgcgcgccgtggatttactccggttccttctccaaaaccctggcgccggggctgcgcgtcggcttcctgatcgcctcgcccgagttgtacccctatttgatgcggctcaagcaggcgaccgatctgcacaccaaccgtccggcgcagtggttcatcgcccgccagctgcgcgatcccggctatgagcagcgcttgctggggctgcgcgaggtgtatcgcgccggccgcgacgcgatgcaggcttcgctgcagcgccatttcggcgatctggccgattggcagctgccgcggggcggcttgtttttctggctcaaattgaagcggacgagggacacccgcgagctgctgccgctggccttgaagcagaacgtcgccttcatgccgggggaagcgttctttcccgagccggaacagaatctgggctatttgcgcttgaacttcagccatgcctcgccggagcggatcgagaccggcatcgccaggctggcggccttgctgcgcgatccggccgcggcggac

SEQ ID NO: 84 - DNA, 5085 bp, Chromobacterium haemolyticum
atgaattcctcatccgatgtcgcgtcgcggcggacgtccgccgccgacaagttcggacctcaccaagcttttccgcatcgcgaagcgcctagcatcgcccggcagttgctgtggcgggcggaggcgagtcccgatcgtctcgcctacgcgtcggccgatccggagaaagcgctcgcgctaagctatgcggcgctgtgcgaacgcgcgtccggcatcgccgcgcgcctggcgcaagcgaccgaggccggcgagcgcgtgatgctggtctatcaggaaccgctcgatttccttccggccttcttcggctgctgcctggccggcgtgatcccggtgccggtggcgccgcgtcacggccgcgacacgatggcggcgatcgcccaggactgcggcgccgccatcgcgttgagcgcggaggcgcgggacgccttgccgggcctgcgctggatgcgcacggacgaggccgagcgcgccgcgccctttttgcgcgcggcgaaggacgccagtccggcgctgctgcagtacacctcgggttcgacgcgcacgccgcagggcgtggtggtcacgcaaaccgggctgtgggcgacgatagacgatcttgaccgcggcgcgatgcacgacgcggacagcgcgatgatcagctggctgccgtacttccacgacatgggcctggtgtacggcattctcacccccttgcaatgcggctttcccgcctatctgatggcgccggagaaattcgtcgcccagcccatgtcctggctgcgcgcgatagccgcgcggcgcggcacccacaccgccgcgccgaatttcgcctacgccttgtgcgcggaccgcgcgggcgatctcgcgccgggcaccgatttgtcgtccttgcgttatgcgctgaacggcgcggagccggtgcgctgcgacacggtgcgccgtttcgaggcggccttcgcgccgtttgggctgcgttcttcggtggtggtgccgggttacggcctggccgaggcgaccttgaaggtgaccgccggccgttgcggcgagggcacgcgcggcgtgcgcttcgcgcgggaggcgctggcgcgcggccgcgtgtcgccgcagacggacggcgtcgaattggcggcctgcggcgtcagcctgatcgatacgcgcgtccgcatcgtggacccggacacgcgcgcgccgtgcgcgccggacgccgtcggcgaaatatgggtgaccgggagcacggtcgccgacagttattggggccgcccggaggagtcgcgcgagatcttcggcgcgcggctggccgacggcgacagcgcatggctgagaaccggcgatctgggctttctgcacgagggcgatctgttcgtcaccagccgcttgaaggatttgatcatcgtcggtggccggaatgtctacagccacgatctggaagacaccgtgtcggcctgccatccgtcgattcggaaggggcgcgccttcgccgccgccgtcgacggcgaggacggcgaagggattctgatcggcgccgaggtgcgcggcggctgcggggaggcggaggcccgtgacatcctgccggtgattcgcgcggcgctggcgcgggagcacggcgtggcgccggcgcgcatcgcgctgctgtggcgaggcagcatcctgcgcacctccagcggcaagacccggcgcggcgccacccgcgacgcgctgctgcgcggcgaactgcgcatcgtcgccgacgacgcggccgaggcggccgacgacgcgattctggccgagatcgcgcgcttcgtgcccggcgcggccgcgtcgcccgatgccaggctgatcgatctggggctggattcgctgtcggccgcgcggcttgccgccgccgcgcgcgcgcgtcatggcgtggagttgtcgttcgcggcgttgttcgcgctttccgcccggcaactgcggcgcgaaatcgtcgacgccccgcgcctggacgccgcggcgccggccgcggctcgccgctatgcggcgggggaggcgttcgaactgtccgagatgcagcaggcttactggataggccagcagggcggggtgccgctgggcagcgtgtccccgcacatccgcgtggatttcgagatagacgccgcgcgcgcgccggaactgggccggcgcctcgcgcggctggtcgcccgccacccgtccttgcggatgacggtgggcgcggacggacgcggcgcgttcgacgcgctggcctacgatcccttgctggcgccgcaggatttgcgcgggctggacgcggcggaggcggcggaacggctggaggcgacgcgcgagagcctggccgagcgcgacggcccgcccgtgctcgccgtcgtctcccgtctgaccgagagcacggctatcctgcacctgcggctcagcctgctggccggcgatctgcgcagcttcctgcaactgatggccgagctggcgcgcgacgcggccgacgaggcccccgcgcaatgcatcacgccgatgacgccgccggcggcgaccgagacgcagcgcgaggcctggctgcgccgggtcgaagccatcgcgccggcgccggagttgccgatgaagatggcgctggtcgaggtggccgagccgcgcttcgccaaccgccgccgggagctgcccgccgccttgtccgcggcgctgacggcgcgggcgcaggcgctcggggtcacgctgacttcgctgtgcatcgccgccttcgccgacacgctgcggctgtggacggcggcgcacgccttcacgctcaacgtgacttgcaacacgcgggcggagcaggcggggctggcgataggcgattacaccagcaacaccttgctgtcgctgagcgagcgtcacccctcgttcgccgccttcgcccaagcggtgcagcggcaagtgtgggccgatctggacgcgccctggtgctccggcgtgtcgattctgcgtgaattgagccggcgcaacggcgcgcccgtgctgatgccggtggtgctgaccagcctgctgtccggcgacccggcggacgatctggccctgctggacggtgtcggccgcgtggtcgacatggccaatcccacgccccaggtgtcgctgcacgccgtcctgggccggcgcggcgacaggctggtgctgatgtgggagtccgtcgcgcagctgttccccgacggcatggtggacgcgatgttcgaggtcttcctcggcgcgctggaaacgatggcgacggacgccgcggcggtggagcggccgacgctggcccggctcgcgccgcagcaggcggcgcggcgcgcggcggtcaacgccaccgcggcggagcgcgcgccgcgccggctggaaacccccatcgtccggcaggcgcggatcgcgccggaggcggtggcggtcaggcagggcgagacgacgctgagctacggcgcgctgctgcgcgaggcggaagacatcgccggcgcgctgcggcaaagcggcgtggcgcgcggcgaggtggtggcggccatcgtcgcgccggggccgcgcgcggtggcggcgctgctgggcattgtgatggcgggggcggtctatctgccgatagagccgtcttggccggccgcgcgcatggaagaactgctcggcgaggccggcgcccgtctcgcgctgctgagcgcggcaggcccggcgctgccggtgcccgcgctgcgtctggaccagccgctgccgcgcggcgacgcgggtccggccgcggatctcgaggccggcgacgcggcctatgtgatcttcacctcgggttccaccgggcggccgaagggcgtgctgatcgcgcacgaggccgcggcgaacaccatagacgacatcaaccaacgcttcgcggtcggcccggccgatcgcgcgctgtgcgtgtcttcgctggcctttgatttgtcggtctacgacatcttcggcctgctcgcggtcggcggcgaggtggtgttcccggcccgctcgcgcgatccggacgcgatggcccaggcgctcagcgacggcggggtcaccatctggaattccgtgccggcggtgctggaactgatgctggaagtgtccgcgccgcgttcgccgcatctgcgcctggcgctgatgagcggcgactggatcgcgcccggcctggccgggcggctgcgcgacgcgtttccggcgctgcggccgatcagcctgggcggggcgaccgaggtgtcgatctggtcggtggtgcatccgatcgcgcccgaggacgccgtgctggcgtcgattccctacggccggccgctgtccaaccagcaatgtttcgtgcgcgcgcccgacggccgggagcggccggacggcgtggtgggcgaattgctgctgggcggccgcggcctcgcgctcgcctatctgggcaacgaggcggaaaccgagcgccgcttcttcatcgacgccgagggccggcggctctaccgcaccggcgatctagcgcgctggcagccggacggcgagcttgagctgctgggacggatggacgggcaggtcaaggtgcagggctatcggatcgagctgggcgagatcgaggcggccgcgatgcgcgccggctgcctggcgcgcgccgtggcctcggtggcccggcgcaaggacgcgacggtgatccagctgcacgtggtggcgctgccggatcatcaaggcgacgtggtcgcggccgtgcgcactcagctggtgctgcacctgcccgcctatatgcagccgcatcacgtgatggtgctggacgccttgccgctgacggcgaacggcaaggtggaccgcgcgcgtctcgccgagctggcggccccggctcccgcgccggcgacgccggccgcggcggcgcggcgcgacgcttcgctggaggccacgatgctggccgccttcgccgaggtggtcggcgtcgagatagacccgcggcagggcttcttcgacgcgggcgccacctcgatgcacatcgtgaggctgcgcgcgctgctggcgtcgcgcggcgtcgcggtgcccccgctggtcgatttcttttcgctggccacgatacgggcgctcgccgagcgcgccgatacgggcgaggcggacctttccccaatgatggacgtcgacggcgcgcgcgcctatcgacagcgcgtacgcgcacgcaaggaggctttg

SEQ ID NO: 85 - DNA, 4665 bp, Chromobacterium haemolyticum
atgacagatgcaacacccgtagacgccgtagcgatcatcggcgcgagctgccgcctgcccggcgtcagcaccctggaacagttctggtcgatgatagccgacggccgggtcgcgatcgaacgcttcggcgcagacgcggcgcgccgcgaaggcgtgccggaaacggtgctggcccagcccggcttcgtcggcgccggcggtccgctggacggcgtcgatcaattcgacgcggcctatttcggcattccgccgtcgcaggcggcggcgatggacccgcagcagcggattttcctcgaatgcgtgcacgaggcgctggagcgcgccggtcacggcgcggcgcgcggcgcgcgcgtcggcgtctgggccggctcggccagcgtcgattatctcgtcgaccacgtgcgcgaccggctggatcgcgcgtcgcccaaccgctatctgcagcaatgggtgggcgtggacaaggactatctggccacccaggtcgcctaccggctcgatttcggcggcccggccatcagcttgcagaccgcgtgctcgacttcccttgtcgccgtggttcaggcgatgcagggactgctgagcttccagtgcgacttcgcggtggcgggcggcgtcagcgtcgccttgccgcagcggcagggccatgtgtacgaggagggcagcattctgtccgcggacggcgcctgccgtccgttcaccacggacagcagcggcaccgtcttcggcaacggcgcgggcgtggtggtgctgcgccgcctggaggacgcgctggccgacggcgaccccatcatggcggtgattcgcggcggcgcggtcaacaacgacggcgcggccaaggtgggcttcaccgcgcccggcgggcgcgggcagcaggacgtgatccgccaggcgctggcgctcagcgaggtggacggcgcgtcgataggctatgtggagacgcacggcaccggcacggcgatcggcgacgaggtggaactggcggcgctgggcgcggccctgggccagcgttccgccgccgacgcgcgctgcgcgctgggcactctgaaggcgaacgtcggccatctgaacgcggcggcgggcgcctgcgggctgatcaaggccgcgctggcggtggcgcatgggcggattccggccgccgtcggcgcggaacgcgcgatagacgcgctgcgcggcgacgccggcttctacctgccgacggaaaccgtgccttgggacgcgccgcagcggcgcgccggggtcagctccttcggcatcggcggcaccaatgcccacgtgatcatagaagcggcgccgccgcgcgcgccgcgcacgccggacgtcgcgccgctcttgctgctgtcggcgcgcggcgaggccttgcccgcgctgtgcgcggactacgcggactttctcgacggccatcccgagctgaggatagaagacgtttgcctgacggcggcgctggggcggcggcattgggagcagcgcgcggcgttccgcgccgaatcccgcgaggccttgatcgccgcgctgcgcgccttcgccgccggcgagccgagcgcggagacgatcgcggcggaagtgccggcgcgcgcgccggaactgagcttcgccttcggcggcgccgaggatctggacgcggtattggcccgcgtgcagctgtggcaggcgagcggcgtcgtgccggccagcgtgtgcgcgacggggagcggcgtgttcgccgcggccttcgcggcgggcgcgctgagtcttgaggatgcgcggcagcgccgcgcggagcgcgccgtcgcgccgtcgctgttgtgggtcagcgcggcctcgggcctgccgctggacagcgcggaggcggtgcgcgaggaactggccggcgcgggcacggcgccaggcgcggcggacgccgccgaggcgctggaagcggccggcgcggaatgggtgctggacttcggcgacacggcgctgggcgcgggcgctgccggcatggtttcgctcgatccggcctcgccggacgcgctggcgcggctgtggaccgcgggcctgacgctggagctgtcccagcattaccgcgacggcaaccgggtggcgctgccgacctatcccttccagcgccagcgtcactggatagaccgcgcgccgcgcttcctggcggcgggcgcgacgcccttccttggacggcgcaccgacgcgccggccttgggcgcgactttcttcgacgccgaatggagcgtggccgtcttgcccttcctgcaggatcacgtgatttacgacaaggtggtggtgtccggcgcggcgctcgcggtgatgatggccgacggcgcgcgcgcgctcaccggctcggacggctgcgtgctgagcgatctgcgcttcccggccgcgctggtgattccgtcgggcgcggcgcgcaaggtccagctgcaattggtgcgcgacggcgacggtttcgaagccacggtgttgacgctggagtccgccgacgtccacgcgacggccagggtggacgccggcgaggcgccgggcgccgcgccggcggagccggtgcgcggagaagcgatctccaccgagctgatggatagctggctgcgcgcgcgcagcgtggtgatgggaccgaccttccggcgtctgtcggacatcgtggtcggggacggcgacgcgtcttgcgatatgcgggacgacgccgacgacgccggctggttgctgcaccccggggtgctggattcggtgctgcaattggtggccgccgccgcgcggcccgagggcagcaaggctttcgtgccgacgcgcatcgcgcggctggcgctgcacgggcggaccggcgccgggatgcgctgtcacgcgtcggccgagcgggggcaggccagcctgttcgacgccggcaaggtgctgctcgaaatgaccggcctggagtcgcgcgaggtgacccgcaatgaattgctgcgcgtcgaaccgctgcgcgagggctatgcggtggaatggcgcgacgcggcgggcggcgacgccgccgcgctgccgccgtccatcgccatcctgagcggagcgggggatacggcggcagggctggcggcgatgctgcgcgacgaaggcaaggaggccgtcgtggtggcggcggtgaacgatattcccttcgacaaggcgggtctgatcgtcgactgccgcgggctggaggcgcgcggcgacgcgccggcgccggcggtttacgccggggcgctggaactgttcgccacggccgcgcgacgcgagcggccttgccgcatcgccttggcgctggcgccggacgcgccggcctcggcgccgctgcaggcgctgtcgcgcgcggtggcgatggaaacgccgcatctgcagacgctggcgctgcacgcgggcgacgcgcgggcgatccgccgcggcctggattacttcgagcgcgagaccgaagtcgcggtcaagggcgaggcggtctccgcgccgcgcttcgacgagcgcgcgctgccgctcagagcggacctcgcgctctcggcggacgccacgtggctgatcacgggcgggctgggcgaactcggcctgcgcgtcgcgagctggctcgccgcgctgggcgcgcgcgccttggtgctgaccggccgccggccggccgacgccgcggccgaggcggcgctggccgcgctgcgccgcgacggcgtggaggtgaaggtgtggcaggccgacgtggcggcggaagcggacgtcgacgcgctgctggccgagatcgacgcgaccatgccgccgctgcgcggcgtctgccatctggcgggcgtggtggaggactgcctggtcggcgacgtcacgccggcgtcgctggccgccaccctggccggcaaggcccgcggcgcctggctgctgcatgagcgcaccctggcttacccgctggaacacttcgtgctgttttcctccgccgccgccgccttcggcgcgccggggcaatcgacctacgcgatggccaacgcctacctcgacgcgctggccgcgcgccgccgcgcgcaagggctgcccgcgctgtccatcgcctgggggccgtggcaggacgtgggcatgctggcccgctccagcgccaacgccaagcggcgactcgcgcagctgggcatcggccagatcgaggccgaatgcggccgcgccactttcgagatcgcgctgggggcggacctgccggcccacctcgtgctgctgcccatcgattgggggcgcttgatcgagcaatggccgccgcatgtgccggccagccgcttcgccggcatcgccaccgcccagcagggcgcgggttccacctcctcggtcagcgagctgctggcgctgccggcggaggaaagacgacatcgtctgttccaactgctggccgaggacgccgcgctggtgaccggcacgccgctggcctcgctggaccccgagcgctcgctgttcgactacgacctggactccttgctgatcaccgatctgcgcgtgctgctggaaaagcgtttcggccgcgcgataccgaccacggtgattttctcgaatccgaccatagccgccttggcggaccatctggcgcggacggtgttcggcatggccgaggcggaggcgacgcccgccgcgcccgccgccgagcccgacgcgccggcggacgtcgcgatgtcgcaggaggagatcgtggaaatgctgtccgcgaaactgaaggaattgaatagaaaggacgcgcga

SEQ ID NO: 86 - DNA, 3543 bp, Chromobacterium haemolyticum
atgagccagatcgacacgaccgcgctgatgcggaacgcgctgcgcgagatcgaacgcctgcagcgcgaactggacggcgccgaacagcgccggcacgcgcccatcgccgtggtcggcatgggctgccgtttcgccggcgtcgactcgccggaggcgctgtggcagcggctgctcgacggcgcggacggcgtgagcgaggtgccggccgagcgttgggacgtcgagcgctacttcgacgccgatccggacgcgagcggccgcatctactgccgcaccggcagctttttggacgacatcgcctccttcgacgccggcttcttcggcatttcggcgcgcgaggcggcgatgctggatccgcagcagcgcatgctgcttgaagtgagctgggaagcggtggagcgcgccggcatgacggcggcggaactgaagggctcggccaccggggtgttcgccggcgtcatgcatcaggactacgcgcaccgtttccgccgggcggaggaggtcgacctctacaccgcctcgggcaacgcgcccagcgtgctggcgggccgcgtgtcgcacgcgctcggcctgcacgggccgacgctgacgatagacaccgcgtgctcgtcgtcgctggtcgccgtgcacctggcttgcaacgcgctgcgcgccggcgagtgcgacatcgccatcgtcggcggcgtcaatgtggtgctgtcgccgctgtccaccgccgccgaatgccgggcgcacatgctgtcgcccagcggccgctgccgctccttcgacgacggcgcggacggcttcgtgcgcggcgagggctgcggcgtggtggtgctgcagcggctcgccgacgccgaagccgccgggcgcaccatagacgcgctgatcgccggctcggcggtcaatcacgatggccgcagcgcgggcctgacggtgcctaacgagcacgcgcagcgcgagctggtgtgggcggccttgcgcgccgcgcgcatcgacgcggcgcaggtgaattatatcgaggcgcacggcaccggcaccgcgctgggcgatccgatagaggcggcggcgctggcctccgtgttcgccggccgcggccgcgaggagcgcgtgctgctgggctcgatcaagagcaatttcggccatctggaaggcgcggcgggaatcgccgggctgatcaaggcggcgctgacggtgcgccatggtgtggtgcccgccactctgcatgtgcgcacgcccaaccgcggcatcgactgggacacgctgccgctgcgcctcgcgttcggcgcggaacgcatagacgccggcggcgcgccctgcgtcgccggggtcagctccttcggcttcagcggcaccaatgcgcacgcggtgctgctcgcgccgccgcgcgcggccgccggagaaacggcggccggcgcggacgaaggcgcgcaattgctggtcgtttccgcgaaatccgacgcctcgctgcgcggcaacgcggcgcggctggctgcccatctggccgggctcgacgccgcggcgtgggcggccgcctgccacgcgtcgcgggcggcgcgctcgcatttcccgcatcggctcgcgctgacggctgtcagcgtggaggagatggcgcgcgagctgagccgcttcgcgcgcggcgaggacgcctccgttcacagcggcgtgtgcggcgggatgccgcccagccgcgacgcgtcgccggagacggcggacgcgggacgcgaaccggccgagcggctggacgccttggcgcggcgctatgtggccggcctgccggtcgactggccggcgccggccagcgccgggcgccgcgtcgcgcggctgccgagctacgcttttgatcgccagccttactgggtggatgaagggcgggcacaggcggagtcgccgctgtaccgcatcgcctggcagccgctgccggccccggccggcgcgcgccgctcgggcgagcgcatcgtcgccggcgatccggccttgtgcgcggaagtggcgcgcgcgctggaagccgccggcgagcgctgcgcgattgcgcccgccgagatcgacgcgatccgccacgcgggctccgccggcctggtgcttgctttcgaccgcgcgtccgggggcgaagacgcggtggaggccgtcgcgcgccgcggcgccttgctgagcgcgctggcgcgagagcgcgccgcgacgccgtcggcggcgccgatcacggttgtcacgcgcggcggggcggctaccgggccggcggaggaggtcgatcccgtcctcgccgccttgagcgcggctgtgcgcgtcgcgcggcgggaacagggccggagctggcgcggcacgatagatatcgacggttcgccggcgtccttcgacgcgctggcggccttgctcgccgatgaggccgccgaggaacaattggcggtgcgcggcgccaccgtgctggcgccgcggctgcggcgcgccggcgccggcgcggccggcgcgctccccgcgctggacgccgacgccgtctatgtggtgaccggcggcaccggcgccttgggcctcgccaccgcgcgctggctggccgggcgcggcgcgcgccatctgctgttgatcagccgcggcggcgaagccggcgcggcggcgcaggccgcttgcgcccgtctgcgcggcgacggcgtcgaggtccgcgtggcggccgccgacgtcgccgacgaggccgccttgcgcggggcgctcgccgcggccggccggccgatacgcggcgtcgcgcactgcgcgggcattgtgcgcgacgcgacgctggacgccgcggccttcgccgagaccctgcgcgccaaggtgggcggcgcggtcttgctggaccggctgaccgaggccgagccgctggacttcttcctgttgtattcgtccatctccgcggcggtcggccgtcacggccaggccgcctacgccgccgccaacggctatctcgacgcgctggcgcagcggcggcgcttgcgcgcgcggccggcgctgtccataggctggggatcttgggcggccggcatgggcgcggccgacgcgaagacggcggaacggattcgcgccggcggcctgaacccgctgagcgagggcgaggccttcgccgcgctggagcgggcgttcaccggcgagccgcatctggtggtggccgcgatcgatcttgcgcggatcgcggcgcagcccgatctgccgccgctgatcgaaggcctggtcggccgcgcgccggccgcgaatgcgcggaccctgtctttcgaccaactgcgcggccgtcccgccggcgagcgccgcgcgcgggtcgccgattatctggacgcggaactgcgcgcggtgctgtccagcccggccgccttgccgcgtcagacttcgctgctggacctgggcgtggactcgctgaccggcgcggaactgcgcaacgcgcttgagcgcgcgctgggggtgtccgtcgcgatctcgcacctgatcgacggctcctcgctggacgagctgatcgaccaggtgatggcgcaactggagcgcaagctggtgacggaacaacattcggccgcgggcgccgacacggaggaaatcacgcta

SEQ ID NO: 87 - DNA, 9159 bp, Chromobacterium haemolyticum
atgaccatggcacggctcatgaccgatcttgccgacgcgggcgtcacgctgcatcgtcgcggcgaccagcttcaggtacaggcgccgcagggcgcgctcgacgccgcgctggtcgcgcggctgcgcgaggccaaggaggcgctgctgagcgtgctcgacgacgaaggcgcgcgcgccgcgccgctggcgccggcgctgccgggcgaggccggcgacgcggcggcgctgtcgccgggacaggcccgtctggtcgcggcgacgcggctgggcgatccggcgatgtacaacgaacaggcggcgatcgaactcgcggatgccgtcgacgaggaggccgtcgcccgcgccttcgcggcgctcgcgcgccggcacgacatcctgcgcaccgtcttcagcgacggcgagccggaactgcagcgggtgctgcccgagccgctcgtcgccttgcaagcgtgggcggtggacggcgacgacgccttgcgcgcgcgctccgcggaactggcgcgacagcccttcgccgccggcgcgccgatgtggcgcgtcgatctgttctcgacgcccgagcgcgccgcggtgctggtgctgaccatccatcacgccatcttcgaccgctggtcgatgagcgtgctgatccgcgatttcagcgcctatctcgcgtcgccggacgcggccgagccctcggcgccccgcctcagttatcgagactatgccgcctggcagcgccgctggatggcgtcgccggactacgccgcgcaactggacgcctggacggaggcgctggcggaggtggacgaggtgccggcgatacgcggcgaccgcgcgcgtccgccggcgctgagcgggcgcggcggcactgaacgcttcgagattccggccgcgtgcatggacgcggcggccgcgttctcccgcggccataacaccacgctgttcaccaccttgttcagcgccttcgcgctgctgcagcatcgttacaccggcgaggcgcgcgggctgacgctgacgccggcggccaaccggcccttccaggcggcggaggacatcgccggctacttcgtcaacctggtggcgctggccaccgaggtgggcgagggcgacagcttcggcgcgctggtggatcgggtccgcgacgccagcgcgcaggccttcgcgcgccagggcgtgccgctggacgccatcgtggagcggctgcgcgcgcgcggcggcccccggcacgagcagctggcgcagaccgtgttcgccttccagaacgtccgcctgccggcggtgcgcaccgcgagcggcgcggccgtgcccttcgatctggacagcccgttcgcgcgcttcgatctttatctgtcgatcgagggcgacgagcgcggcactttcgcggtgtggcagtacaacaccgatctgtacgacgcggccaccatccgccagctgggcgaacattatctggcgctgctgcgcgcggcgctggccgcgccggacgcggacgcgcgcggcttgcccatcctgtccgaggccgaagaagcgcgcctgcgcggatgggggcggcatgagcggccgtatcgggcggacgccgcgatcgacgcgttgttccgcgaatgcgcggccgcccatcccggacgcgtcgcgctggaacagggcggcgagcgctggacttacgcggagctcgatcagtggtcggaccgcgcggccggcgcgctgcgcgcggccggcgtcgaggccggcgcggtggtgggcgtggcgggcgagcgctcgccgcggctgctggccgccttcctcgcgacgctgaaggcgggcgccgcctatctgccgctggatccgacttatccggccgcgcgcctgagcgcgatgacggccgacgccgcgccggccttgatgatcgtcgccgacggtctggacgccggctggctcggcgattacgccggaccggtgctgagcctggccgactgcgaggccggcgacgcgcggcccgtgtcgtccgcggcgcggcgcgcggaagacctggcttatgtgatgtacacctcgggctccaccgggcggcccaagggcgtggcggtgccgcatcgcgcggtggtccggctcgccgtcggcggcggctacgcgcgcttggacgcgtcgacggtgatgctgcagcaatcgccgctgggcttcgacgcctcgaccttcgaaatctggggctgctggctgaacggcggacggctggtgctggccgagcccggcatgcccttcctggacgcggcgtcgcgcgacggcgtcaccacgatgtggctgaccgccgacctgttccgcatggtggtggaagaggagccggccgcgctcggcggcctgcgcgaactgctgaccggcggcgacgcgctgccggtggcgagctgccgcgcctttctcgaggcctgcccgggcgtcgcgctgatcaacggttacggcccgacggaaaacaccaccttcacctgcagccatcgggtgacggccggcgacgtgaagcgcggctcgattccgattgggcggccgataggcaataccgaggtgcgcgtggtcgacgccggcggccggctggtgccggtcggcgtgcccggcgaattgtgggcgggcggcgacgggctcgcgctcggttatctggggcgcgccgacttgacggcggaacgcttcgtcgcggcgccgccgccggacggcgggcgctggtatcgcaccggcgaccgcgtgcgctggcggcgcgacggggcgctggagttcctgggccgagtggatgagcagatcaaactgcgcggctaccggatcgagctgggcgagatcgaggcgacgctgggccatcaccccggcttgagcggctgcgccgtcgcgctgcggcgcagcgccgcggacgagaagcaattggtcggctatctggtggcgcggcaagattcggccgaagccgcggacgcggcggcggtgcaggcatggctggagacgcggctgccgggctatatggtgccgcgcgcctgggtgtggctggacgccttgccgcagtccgccaacggtaaggtggaccgcaagcgcctgccggagccgcagatcgaggcgggcgcggcggcggcggagaacgcggtcgaggcggcgctggtggatatctggcaaggcctgctggggctggagcgcgtgggggtgagagacaacttcttcgcgctgggcggcgactccatcctgagcatacaaatggcgtcgcgggcggcggagcggggcttgcgcatcagcccgcagcaggtgttccgctatccgaccatcgccgagctggcggcggaaagcggcgcggcggaagaaaccggcgcgccggcggagcagggcgaggtgaggggcgaagtgaggcccggcccgatccaggcctggtatctggactggccgggcacggactggcaacagttcaaccagggggcctatctggggctggacggggccgtcgacgcggagtcgctgatcggcgcgctgcaggcggtggcgcagcggcacgacgcgctgcggataggctggcggcgggatggagagcgctggattcaggaaagcggcgcgggcgaaccggtggaagtgaaggccgtggacttgcgcggcctggccgatgcggaggccgcgctggagcgggacgccgccgcgttgcaagccagtctgcgtttgggcggcgcgagcctgtgggcggcgcggctgtaccggctggacgagggctggcgcttgctgtggctggcgcatcacgcctcggtggacggggtgtcgtggcggattctgctggaagacctgtggcgggcctacgcggcgctgagccggggcgaggcggcggcatggccggccaagacggtgtcgtatcaggcgtggtcgcagcggctgtgggaatgggcggaaaccttgccggactcaacgctgagttactggcgggagatggacgcgccggggatgaccctgcccggcgtcggcgcgggcgaagacacggtggcggcggaatcgcgggtgtcgctgcagtgggacgcggcgacgacggaacgctggctgcggcaagcgggcgaggcctatcggatgcgtccggaggaattgctgctggccgcgctggcgcgggccttgcgccaatggacgggcgcggaggaatgcgtgctggacctggaaggccacggccgcgacgggctggcgggcgtggacgtgtcgcgcaccgtgggctggttcaccagcttgtatccgctgcggctgccgctgagcggcgacttgccgcgggatctgaagtcggtgaaggagcggatgcgcggcgtgccggacagcggcatcgcctaccaggcgctgcgttacggcggccgtggatcggagctgggcggccatgcgcgcacggtgtgcttcaactacctgggccaatggcggctggaggaaggcgcgccgggcgcgacttggctgggcgagccgccgggcggcgcgcgctcgggcgggatgaggcggcgctacgcgctggacgtggtggcgcaggtgcacgaaggacggctgcgggtggactggctgtacaacgcggcgctgcaagcggcggacgcggtgacggcgctggcggagcgcttccgcgccgagctggacgcggtgctggcgcactgcctgtcgccgcagtcgggcggcctgacgccgtcggacctgccgctcgcccatctggagcagagcgatatcgacgcgatcgagcacgagcatcccgggctggaggccttgtacggcgtcacgccgttgcagcagggcattctgtttcactccatcgcggacgaggacgcgccgctctatatagaacaactgcactggaaaatgagcggcgtcttcgacgcggaacgcttccgtcaagcctggttcgacgtcgcggcggcgcacgccgcgttgcgcaccaccttccgctggcggcagttgcagagcccggtccaaatcgtccatccccgtctggacccggactgggacacgctggattggcgcgccttgtccgccgaggcctgcgccagccgcttcgacgcgctgcgcgagctggaccgtcaacgcggcttcgatctggaacgcgggcccttgctgcgcggcaccctgatccgcgaacccggcgacgcctggcgcttcctgtggagctaccaccacgcggtggtcgacggctggtcggtgcccttgatcctgaagcaggtgatcggccgctacgccgagctgggcgccggcgacgccgctccgctgccgggcagccgttttctgcccttcgtcaattggctggcggcgcgggacgagagcgagcaggccgcgtactggcaacaggtgttggccggcatagaagagcccacgccgataggcttcgccgcgccggcgcgcggcgcgcaagcgcggggccagggccggcgcgccttcgtgttcgacgcgggcctgaacgagcaggtcgaccgcgccgcgcggcgggccggcgtcacccgcgccagcctgttgaccggcgcctgggcgctgaccctgggctacgccggcggcgggcgcgaggtggtgttcggcaccacgctgtccggccggccggcgacgctgccgggcgtcgagcggatggtggggctgttcatcaacacggtgccggtgcgcgtcggcatcgacgacgacgcgcgcgtgtcgcaatggctgcagcaattgcatggacagcagagcgaacgggccagactgggcgccgcctcgctgaccgacatccggcgctgggcgggctacgagggcggcgagctcttgagcagcctgttcgtggtggaaaactatccggtggaccgccagctggcccgaggcgatgccggtttcgatgtcagcgagttcgcggcggccgagacgcgcaccaattatccgctggtcggtcaactgatcccgggcgaggagaccgtgctctatgtcgatttcgacgcctcgcgctacgacgaggagggcataggccggctgggcgcgagcttcctgcatctgctggcccagctcgccgcgcagccggacgcgcggctgggcgatctgaccttggtcgacgacgacgaggcgcgccggctgattcacgactggaacgcgacgccgccggtcggcgacggctatctgctgcacgccggcatagagcggcacgccgagctgacgccgctggcgccggcgatcataggcgtggacgaggcgatgaactaccgcgagctggccgacgagatgctgcgcgtcgccagggcggtggcggcggcgggcgcgcggcgcgaaccggtggcggtgctgctgccgaggagcgcgcgcgcggtcgccgcttactcgggcgtgatgcgcgccggctgcgcctatgtgccggccgatccggcgatgccgccgggacgcttgcgcgatctgctggccacggtcggccatgtgctgacgacacgcgagcatctgccgctgctggacggcgtcgcggcgcgcgcgatcctgatcgacgaaacgccgccggccgaggtcgcgctgccggaggcggcgcccgacgatctggcctatgtgatgttcacctcgggctccaccggcaagcccaagggcgtgatgatcagccaccgcgcggccgcgctgacgatggaagtcttcctgcgccgttatgagatcggcgcgtccgaccgcttgatgtgcgtgtcggcggcgggcttcgacctgtcggtattcgatttcttcggcgcgttcgcggcgggcgccgccgtcttgctggcgccggagtcgtcgacgatcgcgccggcggcgtggctggatctgatggcacgcgagggggcgacggtttgggaatccgtgccggcggtgatggagctgctgttgctggaatgccggcagagcgggcgcgcgctgccgcccacgctgaagctggcgatgttgagcggcgaccgcgtgccggtggggctgcccgcgcagatccgcgcggcggcgacgtccaatccggaggtgctggcgttgggcggcgccaccgaggcggccatctggtcgtgctggtacgacacgcggggactggcggccgacgccgccttcgtgccctacggccgccatctgccggggcagcggctctatgtgctgtcttcctcgctgcaggcggtgccggtgggcgtgccgggcgatctgtggatcgccggcgcgggcgtggcgctgggttatctcggtcagcccgatctcagcgcctaccgctttgtcgacaatccctttgtgccgggcgagcggatgtaccggaccggcgaccgcgcgcgcgtgcttgccgacggcaatctggaatttctgggccgagtggacgatcaggtcaagatcggcggcttccggatcgagatcggcgaaatcgaggccgcgctggcggccgcgccgggggtggagcgcggcgtggcctcggtggtcgagcgcgacgggcggcggatcatcgccggctatgtgctgttgctgccgggcgcgagcctggattccgccgcgattcgcgacgcgctggcgcggcggctgccgccatacatgctgccggcgtcgatcatggcgctggacagcgtgccgctgagcgccaacggcaaggtggaccgcaagcgtctgccggagccgcagatcgaggcgggcgcggcggcggcggagaacgcggtcgaggcggcgctggtggatatctggcaaggcctgctggggctggagcgcgtgggggtgagagacaacttcttcgcgctgggcggcgactccatcctgagcatacaaatggcgtcgcgggcggcggagcggggcttgcgcatcagcccgcagcaggtgttccgctatccgaccatcgccgagctggcggcggaaagcggcgcggcggaagaaaccggcgcgccggcggagcagggcgaggtgaggggcgaagtgaggcccggcccgatccaggcctggtatctggactggccgggcacggactggcaacagttcaaccagggggcctatctggggctggacggggccgtcgacgcggagtcgctgatcggcgcgctgcaggcggtggcgcagcggcacgacgcgctgcggataggctggcggcgggatggagagcgctggattcaggaaagcggcgcgggcgaaccggtggaagtgaaggccgtggacttgcgcggcctggccgatgcggaggccgcgctggagcgggacgccgccgcgttgcaagccagtctgcgtttgggcggcgcgagcctgtgggcggcgcggctgtaccggctggacgagggctggcgcttgctgtggctggcgcatcacgcctcggtggacggggtgtcgtggcggattctgctggaagacctgtggcgggcctacgcggcgctgagccggggcgaggcggcggcatggccggccaagacggtgtcgtatcaggcgtggtcgcagcggctgtgggaatgggcggaaaccttgccggactcaacgctgagttactggcgggagatggacgcgccggggatgaccctgcccggcgtcggcgcgggcgaagacacggtggcggcggaatcgcgggtgtcgctgcagtgggacgcggcgacgacggaacgctggctgcggcaagcgggcgaggcctatcggatgcgtccggaggaattgctgctggccgcgctggcgcgggccttgcgccaatggacgggcgcggaggaatgcgtgctggacctggaaggccacggccgcgacgggctggcgggcgtggacgtgtcgcgcaccgtgggctggttcaccagcttgtatccgctgcggctgccgctgagcggcgacttgccgcgggatctgaagtcggtgaaggagcggatgcgcggcgtgccggacagcggcatcgcctaccaggcgctgcgttacggcggccgtggatcggagctgggcggccatgcgcgcacggtgtgcttcaactacctgggccaatggcggctggaggaaggcgcgccgggcgcgacttggctgggcgagccgccgggcggcgcgcgctcgggcgggatgaggcggcgctacgcgctggacgtggtggcgcaggtgcacgaaggacggctgcgggtggactggctgtacaacgcggcgctgcaagcggcggacgcgatgacggcgctggcggagcgcttccgcgccgagctggacgcggtgctggcgcattgcctgtcgccgcagtcgggcggcctgacgccgtcggacctgccgctcgcccatcttgaccagaacgatatcgacgaagtgttacagctactgaacgaacagcca

SEQ ID NO: 88 - DNA, 5724 bp, Chromobacterium haemolyticum
atgaacaaaacattatcaaacgccgcgcagcaagccggctcgaaagtcgagaccatgctgccgttgacgccgacgcagcagggcctgctgtttcatacgctgaaagcgccggagtccggcgtctattacgaacaggtcgcttgcgccttccaggtcgcgctagacgcggccgattaccggcgcgcgctggaagcggtgatcgcgcgccacggcgtgctgcgcaccggctttctgtgggacgggccgtccaagccggtgcaggtggtcttccgcgacgtcgaactgccgtgggtggaggaggactggcgggctttcgatcccgaggagcagcggcggcgtctcgccgcctaccgggacgcggaccggcgtccgggctttcacctgagccgcgcgccgctgatgcgctgcgccttgttccgcaccggcgaagaacgctatgagttcgtgtggagctatcaccatctgctgctggacggctggtcggtgcagatcgtgctgggcgaagcgctcgcctgctacgacgcctaccggcgcggggccgagccggccttgccgccgccccagtcctacagcgcttttctgcgctggctggaccagcaggacggcgcggcggccgaggccttctggcgcgagcggctgggcgatgtgcgcgcggccacgcccttgccgctggccgaggaggcgggcccggaacgtgagtgcggccacggcctgctggaacgcgagctggacccgtggacgagcgagggcctgcagcggctggcgcgcgcctgcgagctgacgcagagcacggtgatccaggccgcctgggccttgctgctggcgcgagcgagcggccgcgacgacgtggtgtttggcaccaccgtgtccggccggccggccgagctgcgcggggtcgagcagatggtggggctcttcgtcaacgcgctgccgacgcgcgcgaccgtggacgccgcgcagacgctgggggactggctcagacagctgcaccgccggcatgtggacgccgaagcctacgcctatacgccgctgcacgcgattccgggctggagcggcgtggctccgggcgcgcccttgttcgagagcctggtggtgttcgagaactatccggcgcgcgcggacgcgacgcgctatcgggaacggctgggcgtcggcgacgtcgaggtggtggagcagaccaactatccgctgaccgtggtcgcgattcccggcgagcgtctgcgcttgcgcctgcattacgatcgccagcgcgtgtcggaggcggcggcggagcggatcgtcgcgatgctggcgcggctgctggagcagttcgaacgcggcggcgccgcgctgcgcatcggcgcggcgtcgctgctgggcgcggaggcgggcggcgcgctggtcgcgggctggaacgcggcggcccggcgcgcggacgagacggcgcgccagtgcctgcatcgccgttttgaggcgcaggcgcgcgcgcgccccgatgctgtcgcgctgcaatgcgagggcgaggcgctgacttacgccgaactggatcgccgcgccaaccggctggcctggcggctggacgccgccggggtgcgcggcgacacgccggttgcgctggcgttcgggcgcggcgtggacagcatcatcgcgatactggcggtgttgaaggcgggcgccttctatgtgccgctcgatctcgaccatccgccggagcgtctcgcctggatactggaggatatcggcgccggcgcgctgatctgcggcgaggaagcgcgcgagcgcttcggggacttcggtggggttctgatcgggatgggggatgcggcggagtccggcgagcgcgaagatgcgccgccgccgcgcgacacttcgcccgccgacctgtgctacgtgatctacacctcgggctcgaccggacagcccaagggcgtgtgcgtggagcaccgcaatgtggaccacctgttcgcggcgacgcgccggagctacggcatcggaccgtcggacgtgtggaccctgttccattcctacgccttcgacttctcggtatgggaaatctggggcgccctgctgcacggcgggcggctggaaatcgtgccttaccgctgctcgcgcacgccggaggcgtttctcgcgctgctggagcgcgagggcgtcacgatgcttagccagacccccagcgccttcaagcagctgctgcgcgcgctgggcgacgcgcggcggcccttgccggccggcttgcgccatgtgttcttcggcggcgaggcgctgattcccagccagttcgccgcctgcctgggcgaggagagcggcgtcgcgctggtcaatctctacggcatcaccgagactacggtgcacgtgaccgagcgcgtgctgggcgcgggcgacgcgctctcctcgcgcagcccggtgggccggcccttgcccggctaccgtatctacctgctcgacgccgccgggcatccggtgccgccgggcgtgccgggcgaaatctacgtgggcggggagggcgtggcgcgcggttatcacaagcgtcccgagctcgaccgcgaacgcttcatcgccgaccccttcctgcccggcgagcggctttaccgcagcggggacctcgggcgctgggacgcggacggcgagctggactatctgggccgcatcgacgagcaggtcaagatccgcggcttccgcatcgaactgggcgaggtggaggcggcgctggcccggcacccggacgtcgccgccgcggcggtgatggtggacgaggcgagcatagacggccacgcgcagctggcgggtttcgcggcgccgcgcaagggcgcgtcgctctctcccgccgcgctgcgggactggctgacgcagcgcctgccgccgcacgcgattccggcgcgcctgatcgaggtggacgcgatcccgctgacccctaacggcaagcttgatcgccgccggctggccgacgcgctggcggcggatggcgatgcggcgcgtccgcacgtcgcgccgcgcgatgcggtggaacaggcgctggtcggcgtgttcgaatccgtgctcaaacgctcgccggtcggcgtcaccgacaacttcttcgagctgggcggggactccatcctgagcatccagatcctgtcggccgcgcacaaggtcggcatcgacttcacgctggacgagctgatgcgctcgctgaccatagcaaggctggcgccgcgggtccggcgcacggattcgccgccgccggcggcgagcgcgccgccgccgcctccgccgccgctggacgccgcctacgaggacgtctatccgctcagcgcgatgcagatggcgatgctggccaacgagatgcggcatggccaggactccgcctatcacaacgtcaacgatcagcggctggccctgcccttcgacgcggtcgcgctcgaggcggcgttgcgcggcgccttcgaacgccatccggcgctgcgcaccgccttcgatctggccgccgacgaggagccgctgcagtacgtgcaccgccgggtgtccttgccgctggcggtcagtgactggcggggcctggacgcggcgcggcaggacgcgcggattctggattggcgcgaggccgagcggcgccggcgcttcgacgtcgagcatccgccgctgatccgcttcgccgtgcatcgcctgagcgaggaggagatgcatatcggcgtgaccaagcaccacgcgattctggacggctggagcttcaatctgctgctctccgagctgatctcggactattcggcgcggctggccggccggccgctggcgctgacggcgcccgccagccgctaccgcgacttcgtcgagcgcgagcgcgaggcggcgcgttcggacgcgctgcgcgactggtggcgcgcgcggctgcaatccttgccggccacgcggctggcgcgggagccggacggcgacgcggcgccggcggaggtgccgatttcggccgctgagtccgccggcctggaagcgctcgccgcgcgcgcgggcgcctcggtgaagagcgtgctgctgacggcgcatctgctcgccttgtcgcgcatctgcggcaggccggcggtgacgagcggcgtggtgttcaacggccgcagcgagggcgcggatggcgaccgggtgctgggcctgttcctgaacagcctgccgctcggcttcgatttcccggccggcgtcttcgacgcggtcgcgctggtgcgcgcggtgcaggcggccgagctggaggtgttcagtcgccggcgctatccgctgatcgaactgcatcggcaggtgggcacggtgttcgacgcgctattcaacttcacgcacttccgcgcgctggaggacgcggtgcgcgatatcgaggtgtccgacggctacgcgagcgacacgaccaatgtgccgctggtggtgcaaagcagcttcgacggccggcaaggcgtattgcggatcaccctagtgccgtcgcgcgggcatttctcgacggagaccgtgctccgcttcgtcgcggagtacgcggcggccttgcgcgcgctgctcggcgaaacctcggcgggggacgcggccgccggcggcgcgaccagggcggacgacggcgagcgccggagcctggcctcggcggccgccacgccggcggcggccaaggcgcccgccgccgtgcggcccagcggcgcggcgttgcgacgcgagctgagcgccttgtggacggccgtgctcaagcgcgaaccgccgtcggaggacagcgatttcagcgcgctgggcggagattccttgctgatgctgcggatctgcacccgcgccggccgggcctttggcctggacgcggcggtggtggcccgtctgttgacggcgcagaccgtggccgagcaggcccggatcatcgagaccgagggcgcggacgcggacggcgtccgggtcggcgcgctcgtagcgctgtccgcgccgggcgacgcgccgccgctgttcttcgcgccgggcgcgggcgggcatgtgccgtatctgcgcgcgctcgcggccgagctgtccaaggacttctcggtatggggcatggagcttcccgggtccggcgaggccgacgcgggcggcgtcgaagccatcgcgacggcgctgatcgccgacatccggcgggtgcggccttacgggccttatcgcctgggcggccattctttcggcggctgggtcgcgcttgagattgcgcggcaactggccggccagggcgaggcggtggcttgggtctccatcgtggacagcctgccgccggggccggcggcgcggccgcaaaagcggaactggcgggacagccgctggatggcggagataggcaacagcttcgcgcgtctggccgacgccaagccgctattcgacgccgatgaattcgacgcgctggacgatgcgcggagagtggagcgtttgcgcgagcggctgatagcggcgggcgtgctgccggaggagcttggcctgcccgagttcgcggcgcgcgtgcgcgccttcatcgcgcattcgctgacggattacgcgccggcgacgccttatgccggcgcgctgcatttgattgtggccgcggacagggacggcgaggcggacgcgcccgacgccgccgcgctcatcgacggctggcgcgcggcggcgccggcggcggcgacggcgctgcgcctgcccggcgatcacgtcggcatcatgcgcccccccttcgtcagcgggctggccggcgccttgcgcgccatggaggccgccgcgcggcgggccgtttcggacatggaaaccgaggaagaacaa

SEQ ID NO: 89 - DNA, 1170 bp, Chromobacterium haemolyticum
atgaacaccagagtcaaggcattcgccgccgtcgaggcggcgctggcggaaccggaggcggcgctcgccaacggcgatttcgaaaccgtggaacagttgatgagcggcatccgcgcggccaaccgggcgcacggtctatggctgccgcaggtgccgcgcgccgacggcggcctgggcctgaacctgcttgagctggtggaggtgggcgagctgctgggcgcctcgccgctgggccattacgcggtcaactaccaggcgcccgacgccggcaatatcgacgtgctgctggagtacgcgagcccggcgcagcgccggcgctggctggagccgctattgcgcggcgaactgcgcagctgcttcgcggcgacggagccggagtccgccggatcgaatccctcctcgctgaaaacgacggcggtgtacaaggacggcgcctggcatctgaacggccgcaaatggttcgcgtccggcgccgacggcgcgggcttcgccatcgtgctggccgtcaccgacgaggccgcgccgctgcacgcgcgcaccagcaccttcatcgtgcccgccgacgcgcccggcttccgccacgtccgcaatctgcgggtgatgggggacgagggttgcggctgggccagccacggcgaactggtgctggacgattgccgggtgggcgaggacgcgatgctgggcaagcccggcgagggcttcgtcgtgctgcaggccaggctggccaccgggcggctacaccattgcgcgcgctggataggcgtgtgcgagcgcgccttcgccatcatgtgccggcgcgcctgccgccgggaactggcggcgggcgagctgctgtcctcgcgccagacggtgcagaactggatcgccgagagccgcgcgtcgatagacgcggcgcgcctgctggtgacccaggcggccacgcggctgcaaaaccgccacgagcgcgcgcagatcgacatctcgatcgcgaagttcttcgtggccggcgtgacgcagaccgtgctcgaccacgcgttgcaggtgcagggcgcgttgggcgtcagcggcgacacgattctcaatgtgctgtggcggcacgaacgcgcggggcggatttacgacggcccggacgaagtgcacaagagcctggtggcgcgccatgcgctggccggcttccggcgggagctggcg

SEQ ID NO: 90 - DNA, 1674 bp, Chromobacterium haemolyticum
atggttcgcgtccggcgccgacggcgcgggcttcgccatcgtgctggccgtcaccgacgaggccgcgccgctgcacgcgcgcaccagcaccttcatcgtgcccgccgacgcgcccggcttccgccacgtccgcaatctgcgggtgatgggggacgagggttgcggctgggccagccacggcgaactggtgctggacgattgccgggtgggcgaggacgcgatgctgggcaagcccggcgagggcttcgtcgtgctgcaggccaggctggccaccgggcggctacaccattgcgcgcgctggataggcgtgtgcgagcgcgccttcgccatcatgtgccggcgcgcctgccgccgggaactggcggcgggcgagctgctgtcctcgcgccagacggtgcagaactggatcgccgagagccgcgcgtcgatagacgcggcgcgcctgctggtgacccaggcggccacgcggctgcaaaaccgccacgagcgcgcgcagatcgacatctcgatcgcgaagttcttcgtggccggcgtgacgcagaccgtgctcgaccacgcgttgcaggtgcagggcgcgttgggcgtcagcggcgacacgattctcaatgtgctgtggcggcacgaacgcgcggggcggatttacgacggcccggacgaagtgcacaagagcctggtggcgcgccatgcgctggccggcttccggcgggagctggcgtgagcgcgcggatcgcggagcgcgcgatggcggcgctgggccgcccccgcgtcggcgcgcgcgcgacgcgggtgggcggcggccgggccagcgaggtgttcctggtgcagggcggcgacagcgagctcatcgcctactggctgccggagggcggcgcgcgcgaggcgagacgccgctacgcgctgctggagcggctgtccggccagttccggctggcgcccaggccgctggcggtggacgaggacggcgacgccgcgctgctgctggttgaaaagctggacggcgtcgcgccggccgcctgcggagcgctcggccccgacaccgtgcgccggctcgcggaaaacttcatcgagacgctggcgagcctgcatgcgctggaggtcgcgccggccgatcggcctcccgactatctgcgccgcatcctgagcgaatggcggcggcgctggaacgcggaggaggcgggcgcggcggccgacgccgacttccgggcggtggccgactggctgagcgagcggatgccgcagaccgcgccctccgcctggctgcacaacgactacaagctggacaacatcctcgtcgacccgggcgatccggcgcggctggtgggtgtcgtcgattgggagctggccgcggtcggccatccgctggccgatctcggcgccgcgctcgcttactggatagagggccgggattcgtcgctgctgcggctggacgcgcccgggccaagctgcgcgccgggcgcgccgacgcgcgcggcgctggtggatctgtacgccgccgccggacgcgaggtgacggaacccgcctactggtacgcctacggcctgctgcggctggcggtgatcacgcaacaactggcgctgcggcgccgcgacgaagggcagcgcgtgccgcgcgccaagctgatcgtgcgctggctgctggaccgcgcggcggaagcctgcggcggcggccggctg

SEQ ID NO: 91 - DNA, 903 bp, Chromobacterium haemolyticum
atgaataccgaaacttccacaacgcccttcgacgtcatcgtgatcggcggcagtcacgccggacaatccgccgccttgcagatcgcgcgcgcgcgccgccgggtgctggtgatcgacgccggcgcgcgccgcaatcgcttcgccgcccaatcccacggcgtgatcggcctggacggacgctcgcccgacgcgatcgccgcggacggcaaggcgcaattgctggcctatcccaacgcgcaatggcgcgcggacaccgtggtccgggccgagagcggcgaggccggctacgcgctgcgctgcgcctccggccaaagctacgccgcgcgccagctggtgctggccttcggcgtggtggacgaattgcccgagctggagggcctgcgcgagcgctggggcgaaagcgtgttccactgcccttactgccacggctacgaactgaagcagggccgcatcggcgtgctcggcggcggtcccttgtcctatctgtcggcgatgctgatgccggaatggggtccgaccgttttcctgagcgacggcggcttcgagccggacgcggcgcagcgcgaggcgctggcgcagcggggcgtcgacatcgtgcgcgaacggatcgcgcgcatcgtcgagcgcgccaccgtcgagctggccgatggacgccggctggcctttgacgggctgttcatgatgaaccgcttccgcctgtccagcccggtggcggagcagctgggctgcgtgatcgaggagggaccgctggggccttatgtgcggaccgacgacgcgatggaaacatcggcgccgggcgtattcgcctgcggcgacatcacccagcggggcggcaccgtggcgctggccatcggcaacggcgcgctggcgggcatcgccgcgcatcgcaaactggtgttcgga

SEQ ID NO: 92 - DNA, 912 bp, Chromobacterium haemolyticum
atgagttggcaaaacctatgtttctcctggctgttgcgcagaacggccaaatccctgacccgcaagcccggcctgaccgcccaggaaatgcgcgagcgcagcgcgaaatgggcgcgcggcgaaatcaagccgccgcgcggctggcgggtgcgcaagctggacgcggaggcgctgcgcggcgagtggatagagcctgaagccgccgcgcggcgcgaggcgagcgggcgggtgatcctgtatttgcacggcggcggctattgcttctgctcgccgctgacgcaccgcggcgtggccgccgcgctggcgcgggaggcggacgcgcgcgcgttctcgctggcttaccggctggcgccggaacatccgttcccggccgccgtcgacgacgcgctggcggcgtatcgggagctgttggacgagggcgtggcgcctgagcgcatcgtggtcgccggcgattcctccggcggtgggctggcgctggcgctgctgctgtcgctgcgcgacgcgggcgcgccgatgccggccggcgcggtcttgttctcgccgtggacggatctggcggcgaccggggcctcgctggaagcgaacgacgcgtccgacgtgatgctgagcgcggtggcggtgaggaatttctcgcgctactaccttggcgacgccgccgccgatcatcccatcgcctcgccgctctacggcgagtacgcgggcctgccggacctgttcatccaggccagcgacagcgaggtgctgctggacgatgccgcgcgcgtggccagcaaggcgagcgcggccggcgtcggcgtggacttcaaggtgtggcggcggctgccgcacgcctgggccaccctgacgccgatgctgccggaagcgagggctgcgatcaaagaagccggcggcttcatccgcaaggtggcgcca

SEQ ID NO: 93 - DNA, 747 bp, Chromobacterium haemolyticum
atgaaccgcggctgggtggatgccgcgccggccggccaagccgcggccttgcgcctgttctgcttcccttacgccggcggcagcgcgacggtgttccgcggctgggccgagcgcttgccggccacggtggatctccggcccatgcacccgccggggcgggggcggcgctttcacgatccgctgcgctaccggctggatcaactggccgacgaggcgacggacgcgatcgcgccgctgctggaccggccttatgccttgttcgggcacagcatgggcgcgagcctggccttcgaggtggcccagcgcgcgcgggcgcgcggcttgccggcgccctgctgcctgatcgtgtccggccgcgccgcgccgcatctgcccgccaggcggcggccgatacatgcattgcccgatgatgagttcatcgacgaagtgctgcggatgaacggcacgccgcctgaggtgctgcaacatcccgaactcgtcaacatcgtcctgccggtgctgcatgccgatttcgaggcgatagagacttatcgtcccgcgccgcgtcctcctttgagctgccgcatcgtcgcgctgggcggcagcgaagaagagggcggcgtcgaggcggcagcttcctggcagggctatgccaccggcggttttcgcagcgagatcctgcccggcgatcacttcttcctgaacgggagggcggaacgcttgttcgcgatactgcgcgaagaactggagcgtggcgccggggcggct

SEQ ID NO: 94 - DNA, 267 bp, Chromobacterium haemolyticum
atgaactgtcccacttgccaagtcaccctgctgatgggcgagcgtttgtccgtcgccatcgattactgcccgcagtgccgcggcgtctggctagcgcccggccagctggagcggctgctgcaaacccaggcgccgaccctgcccgcagcgccccaagccgccgccggctgcgcgccggccgcgcccgcgcatggccatggcgagtcgcatcgctccggcggccgccatggcggcaagcacggcggctggctgcgcaagctgctggac

SEQ ID NO: 95 - DNA, 465 bp, Chromobacterium haemolyticum
atggctgacctatctgcacccgatgacatgcgcgccgcgatggaagccttcttccatgcctacaaggctttcaccgacaaaccggatgaaatgctggccaagcgcggcttggcgcgtgtgcaccaccgcatcctgttcttcgtcgcgcgctaccccggcctgtcggtcaaggacttgctaggcgcgctgggcgtgaccaagcaggccatcaatatgcccttgcgtcagttgctggaaatggatttggtgcaaagcgtcgccgcgcatcacgacaaacgggtcaagcaattgtcgctgaccacggagggacgcaagctggaagagaccctgcaccgcgagcagttgaaattgctgcagacagccttcgatctgaccggcaagccggccactgccggctggatggcggtgaatcacagcctggcggcgcatacccgcctcggtgcacaggagccccaggacaaggct

SEQ ID NO: 96 - DNA, 1167 bp, Chromobacterium haemolyticum
atgcagagtaccatgttttcagagcgtatcgaacggctcagcggatcgctgatccgggaaatcctggcggcggcgcaacagccgcaaatgatctctttcgccggcggcctgccggccggtcaatgcctgccgcaactggatttcgccgacatgccggcgggcttggcgcagtacggcgccagcgagggcgaaccggagttgcgagaactgatcgcggagcaggcgcgacggatgggcatagcttgtgaggcggagcaggtattggtgttgtccggctcacagcaaagcatagatttgtgcgccaagctgttcgttgatcccggcaccccggtgctgaccgaggggccgacctatctggcggccttgcaagccttcaaattgttcggcgcccgcatccatgcggtggtgcagcaggatggacggctgccgccgcaggccttggccgccgcgctggagcaggcgcggccacgctgctgttatctgattcccagcttccagaacccggcgggcagctgttacagcgccgaagaccgccaggcgctggccgcggcgatagacgccgccggcgtgcccttgatcgaggacgacccttatcgcgcgctgagctatgacggcgacgcgccggcgccgctggtcagtcatttgaaaaccgcgccgtggatttactccggttccttctccaagacgctggcgccggggctgcgcatcggcttcctgatcgcctctccggatttgttcccttatctgatgcggctgaagcaggccaccgacttacacagcaaccggccggcgcagtggttcattgcccgccagctgcgcgaccccggccatgagcaacgcctgctgggcctgcgcgaggtgtaccgcgccggccgcgacgcgatgcaagcatcgttgcagcgccatttcagcgatctggccgattggcaattaccgcagggcgggctgttcttctggctcaaattgaagcagccgcgggatacccgccaagtgttgccgctggccttgcagcaaaacgtcgccttcatgccgggcgaggcgtttttcccggatccggagcggaacttgggctatctgcgcctgaatttcagccatgcctcgccggagcgcatcgagaccggcatcgcgcggctggcggccttgctgcgcgagcaggccgcgatagcc

SEQ ID NO: 97 - DNA, 5145 bp, Chromobacterium haemolyticum
atgggtgctcgccccgtctttccggagccgttgtcgatacatggaggtcaggcaatgtattcctcatccgaggtcgcatcgcggcggaaatccgccgctgacaagttcggagttcatcatgcttttccgcatcgcgaagcgttgagcatcgcccggcagttgctgtggcgggcggaggcgagtcccgatcgcctcgcctacgcgtcggccgatccggtgaaaaacgtcgcgctgagctatgcggcgctgtgcgaacgggcatccggcatcgccgcgcgtctggcgcaagcgaccgagaccggcgatcgcgtgatgctggtctatcaggaacctctcgatttccttccggccttcttcggctgttgcctggccggcgtgattcccgtgccggtggcgccgcgtcacagtcgggacatgatgcttgcgatcgcagaggactgcggtgcggccatcgcgctgacggccgaggcgcgcgacgccttgcctggcctgcgctggatgcgcacggacgagaccgagggcgccgcgcctttcctgcgcgccgcggacgaaggcagtccggttttgctgcagtacacctcgggctctacgcgtacgccgcagggcgtcgtggtgacgcagaccgggctgtgggcgacgatagacgatcttgatcgcggcgcgatgcacgacgcggacagcgtgatgatcagctggctgccatactttcacgacatgggtctggtgtacggcattctcacccccttgcaatgcggttttcccgcctatttgatggcgccggagaaattcgtcgcccagcccatgtcctggttgcgcgccatagaggcgaggcggggcacccacaccgccgcgccgaatttcgcttatgccttgtgcgcggaccgcgcggcggatctcgcgcccgggaccgatctgtcgtcgctgcgttacgcgctgaatggcgcggaacccgtgcgctgcgacacggtgcgccgcttcgaggcggccttcgcgccgtttggactgaaaccgtccgtggtggcgccgggctacggcctggccgaggcgacgctgaaagtgaccgccggtcgttgcggggagggcacgcggggcgtgcgcttcggacgagacgcgctggcgcgaggccgggtgtcgccggaggcggacggggttgaattggcggcctgcggctcgagtctgatcgatacgcgcgtccggattgtcgatccggaaacgagggagccctgcgcggcggatgtcgtcggcgaaatctgggtggcgggaagcacggttgccgatagttactggcgccgccctgaggaatcgcgcgagatcttcggcgcgaggctggctgatgacgacggcgcctggttgcgaactggcgatcttggtttcctgtacgacggcgatctgttcgtgaccagccggctgaaggatttgatcatcgtcggcgggcggaatttttacagccacgatctcgaagacaccgtgtcggcctgccacccgtccattcgaatggggcgcgtattcgccgccgccgtcgacggcgaggagggcgaaggggttttgatcggcgcggaggtgcgcagcggctgcgaggaggcggatgcccgcgagatcctgtcggtgattcgcgcggcgcttgcgcgggaacacggcgtggcgccggcgcgtgtcgcgctgctgcggcgcggcagcattctgcgtacgtccagcggcaaaacccggcgcagcgccacccgcgacgcgctgctgcgcggcgagctgagcatcgtcgccgacgacgcggccgacgcgagcgacgacgcgattctcgccgagatctcgagttttgtgcccggcgcggcggcggcgcccgacgccaggctgattgatctggggctggattcattgtcggccgcgcggcttgccgccatggcgcgggcgcgtcacggcgtggaattgtcgttcgcgacgctgttcgcgctctcggccgagcaactgaggcgcgagatcgccgccgccggagtccggcttgccgagattgtcgcgcccgtttcggttcggggctacgctgcgggtgagccgttcgagttgtccgagatgcagcaagcttattggataggccagcagggcggcgtgccgctgggcagcgtgtcgccgcacatccgagtggacttcgagatcgacgccgcgcgcgcgccggaattgggccggcgtctcgcgagcctggttgcgcgtcatccgtctttgcggatgacggtggacgcggacgggcgtggggtgttcgacgcgctcgcttacgatcctttgctgccgccgcaggatttgcgcggactcgatgcggcggaggcggccgaacgtctggacgcgacgcgcgcaagcctggccgagcgcgacggaccgcccgtggttgcggcggtgacccgtctgacggacagcacggccatcctgcacatgcggctcagcttgttggctggagatctgcgcagctttctgcaactgatggccgaactggcgcgcggagcggccggcgatgctcccgcgcaactgattacgccgatgacgccggcggcgccgaccggcgagcagcgcgaggcttggttgcgtcgggttgaagccatcgcgcccgcgcctgaattgccgatgaagatggcgctggccgacgtggccgaaccgcgcttcgccgaccgccgccgtgaattgcccgccgctctgtccgccgccttggcggcgcgcgcgctggggcttggggtcacgctgacttcgctgtgcatcgccgccttcgccgacaccttgcggctgtggacggcggcgcacgcgttcacgctcaatgtgacttgcaacacgcgggcggagcaggccgggcaggcgataggcgattacaccagcaacgccttgctgtcgctgagcgagcgccacgagtcgttcgccgcgttcgcgcaggaggtgcagcggcaagtatgggcggatctggacgcgccctggtgctccggcgtgtctatcctgcgcgaactgagccgccgcaacggcgcgccggtattgatgccggtagtgctgaccagcttgttgtccggcgacccggcggacgatctggccatcctggacggcatcggccgcgtggtcgatatggccaatccgacgccgcaggtgtccttgcacgccgttctcggccgtcgcggcgataggctgctggtgatgtgggagttcgtcgccaagttgttccccgagggcatgatagacgcgatgttcgacgccttcctcggcgcgctggaaatgatggcgactgaagccgctgcccttgagcggccgacggtggcccggctcgcgccgcagcaggcggcgcggcgcgcggccgtcaacgccaccgaggcggagcgcgcgccgcgccggctggaaacgcccatcgtccggcaggcgcggaccgcgccggaggcggtcgcggtcagacagggcgaagcgaccctgagctacggcgagttgctgcgccaggcggaggatatcgccggcgcgctgcggcaaagcggtgtcgcgcgcggcgacgtggtggcggccatcgtcgcgccggggccgcgagcggtggcggcgctgctgggcatcgtgatggcgggcgcggtctatctgccgatagagccgtcttggccggccgcgcgcatcgaggagctgctcagcgaagccggcgcccgccacgcggtggtgagcgagggcggcttgacgctgcctgtgcaagcgttgcgtcttgatttgccgctgccgcgcggcgacgcgggtccggcccaggaccttgaggccggggacgcggcctacgtgattttcacctccggttctactgggcggccgaagggggtgttgattgcgcacgaggccgcggcgaacacgatagacgacatcaacgagcgtttcgcggtcggcccggccgatcgcgcgctgtgcgtgtcctcgctggccttcgacttgtcggtctacgacatcttcggcctgctcgcggtcggcggcgaggtggttttccccgagcgcgctcgggaccccgacgcgatggcccaggcgctccgcgacggcggggtcacgatctggaattccgtgccggccgtgctcgaattattgctggacgtggccgcgccgcgctcgccggatctgcggctggcgctgttgagcggcgattggatcgcgcccggcctggccgggcggctgcgcgacgcgtttccggcgttgcggcccatcagcctgggcggggcgacggaggtgtcgatctggtcggtggtgcatccgatctctcccgaggacgcgacgctggcgtcgattccctacggcaggccgctgtccaatcagcaatgtttcgtgcgcgcgccggacggccgggagcgcccggacggcgtggtgggcgaactgctgctgggcggtcgcggcctcgcgctcgcctatctgggcaacgaggcggaaaccgagcgccgtttcttcatcgacgccgagggccgcaggctctaccgcaccggcgatcttgcgcgctggcagcccaacggcgagcttgagctgctcggacgaatggacgggcaggtcaaggtgcagggttatcggatcgagctgggcgagatcgaagcggccgcgatgcgcgccgcttgcctgacgcgggcggtggcctcggtggtccggcgcaacaacgcgacggccatccagctgcatgtggtcgcgcaaccggattacgacggagacgtcgtcgcggccgtgcgcgccaagctggttctgcatctgcccgcctatatgcagccgcatcacgtgacggtgttggacgctttgccgctgacggcgaacggcaaggtggaccgcgcgcgtctcgccgcgctggcggctccggcgcccgcgccggccaagcccgccgccgccgcgcggcgcgacgactcgctggaggcgacgatgctggccgccttcgccgaggtggtcggcgtcgagatagacccgcagcagggcttcttcgacgcgggcgccacgtcgatgcacgtggtgcggctgcgcgcgctgttggcgtcgcgcggcgtcgcggttcccccgctggtcgatttcttttcgctagccacgatacgggcgctcgccgagcgcgccgattcgggcgacgcggacctttccccaatgattgacgtcgacggcgcgcgcgcctatcgacagcgcgtacgcgcacgcaaggaggctttg

SEQ ID NO: 98 - DNA, 4659 bp, Chromobacterium haemolyticum
atgactcattcaacacccgtggatgccgtagcgatcatcggcgccagttgccgcttgcccggtgtcagcaccctggaacagttctggtcgatgattgccgacggccaagtggcgatcgagcgcttcggcgcggacgctgcgcgccgcgaaggcgtgccggagacggtgctggcccagcccggcttcgtcggcgccggcggtccgctggacggcgtcgaccagtttgacgccgcctatttcggcattccgccgtcccaggcggcggccatggatccgcagcagcgcatcttcctggaatgcgtgcacgaggcgctggagcgcgcagggcacggtgcggcgcgcggcgcgcgcgtcggcgtctgggctggctcggccagcgtggattatctcgtcgaccatgtgcgcgaccggctggaccgcgcgtcgcccaaccgctatctgcagcaatgggtgggcgtggacaaggactatctggccactcaggttgcgtaccggctcgacttcggcggcccggccatcagcttgcagaccgcgtgttcgacttcgctcgtcgccgtggtccaggcgatgcaggggttgttgagcttccaatgcgatttcgcggtggcgggcggggtgagcgtcgctttgccgcagcggcagggatatgtgtacgaggagggcagcatcttgtccgcggacggcgcctgccgtccgttcaccacagacagcagcggcacggtcttcggcaacggcgccggcgtagtggtgctgcgccgcctggaggacgcgctggccgatggcgatcccatcatggcggtgattcgcggtggggcggtcaacaacgacggcgcggccaaggtgggtttcaccgcgcccggtgggcgcgggcagcaggaagtgattcgccaggcgctggcgttcagcgaggtggacggagcgtcgatcggctatgtcgagacgcacggcacgggcacggcgatcggagacgaagtcgaattggcggcgctgggcgcggctttgggcgagcgctccggcgcgcgctgcgcgctaggcacgctgaaggcgaacgtcgggcatttgaacgcggcggcgggcgcttgcgggctgatcaaggccgcgctggcggtggagcatgggcggattccggccgccgtcggcgcggagcgcgcgatagacgcgttgcgaggcgacgccgcgttttacctgccgacggaaaccgcgcgctgggacgcgccgcagcggcgcgcgggggtcagttccttcggcatcggcggcactaacgcccacgtgatcatcgaagcggcgccgccgcgcgcgccgcgcacggcggatgtcgcgccgctcttgctgttgtcggcgcgcggcgaggccttgccggcgctgtgcgcggattacgcggactttctcgaagaccatcccgaactgaggatagaggacgtttgcctgacggcggccctggggcggcgtcattgggagaagcgcgcggcgtttcgcgccgaatcccgggaggcgctgatacgcgcgctgcgcgccttcgccgccggcgagccggatgcgggcgtgatcgcggcggaaacgccggcacgcgcgccggaagtcagcttcgccttcggcggcgcgggcgatctggacgcggtgctcgcccgcgtgcggctgtggcaagcgagcggcgtcgttccggccagcgtgtgcgcgacggggagcggggtgttcgccgcggctttcgcggcgggcgcgctgagccttgacgatgcgcggcagcgccgcgcggagcgcgccgtcgcgccgtccttgctgtgggtgagcgcggcttcgggcctgccgctggacagtgaggaggcggtacgggaagaactggcgcgcgcggggatggcgcttagcgccgacgccgccgccgaggcgctggaggctgccggcgcggaacgggtgttggacttcggcgacacggcgttgggcacgggcgccggcatggcatcgctggatccggcctctccggactcactggcacggctgtggactgcgggcgtggccttggatctcgtgcagcattaccgcgacggcaaccgggtggcgttgccgacgtatcccttccagcgccagcgtcactggatagaccgcgcgccgcgtttcctggcggcgggcgcgacgcccttcctcggacggcgcaccgacgcgcccgccttggacgcgaccttcttcgacgcggagtggagcgtggccgtcttgcccttcctgcaagaccatgtgatctacgacaaagtggtggtgtccggcgcggcgctcgcagtgatgatcgccgacggcgcgcgcgagctgacgggatcggacgcctgcgtgctgagcgatttgcgcttccctgccgccttggtgattccgccggacgcggcgcgcaaagtccagttgcagctggtgcgcgacggcgacggcttcgaagccacggtgttgacgttggagtccgccgacgtgcacgccacggctagggtggacaccggcgaggcgcctggcgttgcgccgtcggagccggtgcgcggagaagcgatctcctccgatttgatggatacctggctgcgcgcgcgcagcgtggtgatggggccgaccttccggcgcttgtcggacatcgtcgtcggggacggcgacgcgtcttgcgatatgcgggccgacgccgacgacgcgggttggttgttgcatcccgggattctggattcggtgttgcagctggtggcggccgccgcgcggcccgagggcagcaaggcttttgtgccgacgcgcatcgcgcggttggcgctgcaagggaggaccggcgccgggatgcgctgtcacgcgtcggccgagcgggggcaggccagtctgttcgacgccggcaaggtgctgctcgaaatgaccggcctggagtcgcgcgaggtcactcgcaatgaattgctgcgcgtcgagccgctgcgcgagggctatgcggtggaatggcgcgacgcggcgggcggcgaggccgccgagttgccggcgtccatcgccatcctgagcgacgcgggacagacggcggccgggttggcggcgatgctgcgcgacgaaggcaaggaggccgtcttggtggcggcggtgaaggatattcccttcgacaaggcgggcctgatcgtcgattgccgcgggctggaggcgcgcggcgacgcgccggcgccggcggtttacgcgggtgcgctggaactgttcgccacggtcgcgcgacgcgagcggccttgccgcatcgccgtggcgttggcgccggacgcgccggcctcggcgccgctgcaggcgctgtcgcgggcggtggcgatggaaacgccgcatcttcagacgctggcgctgcatgcgggcgacgcgcgggggatccgtcgcggcctcgactgctttgaccgcgagaccgaagtcgccgtgcggggcgacgccgtcaccgcgccgcgcttcgatgaacgcgcgctgccgcttcgggccgatctcgcgctctcggccgacgccacttggttgatcacgggcgggctgggcgaactcggcttgcgcgttgcaagctggttggccgcgctgggcgcgcgcgccttggtgctgaccggccgccggccggccgacgccgcggccgagtcgacgctgtccgccctgcgccgcgacggcgtcgaagtgaaggtgtggcaggcggatgtggcggtggaggcggacgtcgacgcgttgctggccgagatcgacgcgaccatgccgccgctgcgcggcatctgccatctggcgggcgtggtggaggactgcctggtcggcgacgtcacgccggcgtcgctggccgccactctggccggcaaggcccgcggcgcctggctgctgcatgagcgcaccctggcttacccgctggaacactttgtgctgttctcctccgccgccgccgccttcggcgcgccggggcaatccacctatgcgatggcgaacgcctacctcgacgcgctggcggcgcgccgccgcgagcaggggctgcccgcgctgtccatcgcctggggtccgtggcaggacgtcggcatgctggcccgctccagcgccaacgccaagcggcgtctcgcgcagctgggcatcggccagatcgaggccgaatgcggccgcgccactttcgagatcgcgctgggggcggatctaccagcccatctcgtgctgctgcccatcgattgggggcgcttgatcgaacaatggccgccgcatgtgccggccagccgcttcgccggcatcgccaccgcgcagccgggcgcgggctccacttcctcggtcagcgaactgctggcgttgcccgcggacgaacggcgacaccgcttgttccaactgctggcggaggacgcggccttggtgacgggcacgccgctggcctcgctggaccccgagcgctccttgttcgactacgacctggattccttgctgatcaccgatctgcgcgtactgctggaaaagcgtttcggccgcgccatcccgaccacggtgattttctcgaatccgaccatagccgcgctggcggaccatctggcgcggacggtattcggcatggccgagtcggaggcgacagccgccgcgcccgccgccgagatcgacgcgccgacggacgccgctccgctgtcgcaggaggagatcgtggaaatgctgtccgcgaaactgaatgaactgaatagaaagggcgcgcga

SEQ ID NO: 99 - DNA, 3546 bp, Chromobacterium haemolyticum
atgagccaaatcgacacgacgatgctgatgcggaacgcgttgcgggagatagagcgcttgcagcgcgagctggacggcgcagagctgcggcggcatgcacccatcgccgtggtcggcatgggttgccgcttcgccggcgtcgattcgccggaggcgctgtggcggcggctgcttgacggtgaggacggcgtgagcgaggtgccggcccagcgttgggacgccgagcgctactttgatgccgacccggacgcgaagggccgcatctattgccgaaccggcagctttctggacgatatcgcctccttcgacgccggctttttcgggatttcggcgcgtgaggcggcgatgctggatccgcagcagcgcatgctgcttgaagtgacttgggaagcggtggagcgcgccgggatgacggcggcggaactgaaaggctcggccaccggggtgttcgccggggtcatgcatcaggactacgcgcaccgcttccgccgggccgatgatgtcgatctctacactgcctcgggcaacgcgcccagcgtgctggcgggccgcgtgtcgcacgcgctggggctgcacgggccgacgctgacgatagataccgcgtgctcgtcgtcgctggtcgccgtgcacctggcgtgcaatgcgctgcgcgccggcgagtgcgacatcgccatcgtcggcggcgtcaatgtggtgctgtcgccgctgtccaccgccgccgagtgccgggcgcatatgttgtcgcccagcggccgttgccgttccttcgacgacggcgcggacggtttcgtgcgcggggagggctgcggcgtggtggtgttgcagcggcaggccgacgccgaggccgccgggcgcacgatagacgcgctgatcgccggctcggccgtcaatcacgatggccgcagcgcgggcctgacggtgccgaacgagcacgcgcagcgcgagctggtgcgggccgcgctgcgcgcggcgcgcatcgacgcgtcccaggtgaactatgtcgaggcgcacggcaccggcaccgcgttgggcgacccgatagaagcggcggcgctggcctccgtgttcgccggccgcgatcgcgcggatcgcgtgctgttgggctcgatcaagagcaatttcggccaccttgaaggcgcggcggggatagccgggctgatcaaggcggcgttgacggtgcgccatggcgtggcgcccgccacgctgcatgtgcgcacgcccaaccgcgacattgaatgggacaccctgccgttgcggctcgcgcttggcgcggaacgcatagacggcggggacgcgccctgcgtcgcgggcgtcagctcctttggtttcagcggcaccaacgcgcacgcggtgctggtcgcaccgccgcgcgttgctggcgaaacggcggccagcgtggacgaaggcgcgcagttgctggtggtttccgcgaaatccgacgtctcgctgcgcggcaacgcggcgcggctggcggctcatctggccggactcgacgcctcggcgtgggcggcggcctgccatgcgtcgcgcgtcgcgcgttcgcatttcccgcatcggctcgcactgacggcggctaccgcggaggagatggcgcgcgagctgggccgctttgcgcgcggcgagacggcggccgtccacagcggggtgtgcggcggaatgccgttcggccgcgacgcggcggcgcccgagacggacgcgggcggcgacccggccgagcgcctggacgcgttggcgcgacgctatgtggccggcctgccggttgactggccggcgccggccggcgccggacgccgcgtctcgcggctgccgacctatgcctttgaccgtcagtcttactgggttgacgaagggcccgcgaccgaggagtcgccgctttaccgcattgcctggcagccggtggaggctccggccggcgcgcgccgatcgggcgagcggattgtcgccggcgatccggctttgtgcgcggacgtggcgcgcgcgctggaagccgccggcgaacgctgcgtgatcgcggccgccgagatcgacgcgattcgccgcgcaggctccgccggcctggtgcttgctttcgaccgcgcgtccgggagcgaggacgcggtggaggccgtcgcgcgtcgcggcgccttgctgagcgcgctggcgcgcgagcgcgccgtgacgtcgtcggcgtccattgccgtggttacgcgcggcggggcggcgaccgggccggcggaggacgttgatcccgtcctcgccgccttgagcgctgccgtgcgcgtcgcgcggcgcgaacagggccgagcctggcgaggcacgatcgatattgacggctcgccggcctccttcaacacgctggcggcgctgctcgccgacgaagccgtcgaggaacaactggcggtgcgcggcgccaccgtgctggcgccgcggctgcggcgcgcgggtgttggcgcggcgaccgcgctgccggcgctggacgctgacgccgcctacgtggtgaccggcggcaccggcgccttgggcctcgcgaccgcgcgctggctggcccgccgcggcgcgcgccatctgctgctgatcagccgtggcggcgaaaccggcgacgccgcgagggccgcttgcgcgagtctgcgcgacgacggcgtcgaggtccgcgtggcggcggccgacgtcgccgacgaggccgctttgcgcggcgcgctcgccatggccggcaggccgatacgcggcgtcgcgcactgcgcgggcattgtgcgagacgcgacgctggacgcgctggacgccgcggccttcgccgcgaccctgagcgccaaggccggcggcgcggtcttgctggaccgtttgaccgagggcgaaccgctcgacttcttcctgctgtattcatccatctccgcggcggtgggccgtcacgggcaggccgcctacgccgccgccaacggctatctcgacgcgctcgcgcagcggcgacgcttgcgcgcgcggccggcgttgtccataggctggggatcttgggcggcgggcatgggcgcggccgacgcgaagacggcggaacgaattcgcgccggaggcctgaacccgctgagcgaaggcgaggccttcgccgcgctggagcaggcgttctcgggcgagccgcacctggtggccgcctcgattgatctgggccggatcgcggcgcagcccgacctgccgcgcctgattgaagacttggtcggccgcgcgccggccgcgagcgcgcggaccctgtctttcgaccaactgcgcggccgtcccgccggcgagcgccgcgcgctggtcgccgattatctagaggcggaattgcgcgcggtgctgtccagcccggcggccttgccgcgtcagtcctcgctgctggacctgggcgtcgactcgctgaccggcgcggaattgcgcaacgaattggagcgcgcgctgggcgtgtccgtcgccatcacgcatttgatcgacggctcctcgctggacgaactgatcgatcaagtcatggcgcagctggagcgaaagctggtgacagaacaacactcggccgtcggcgccgacacggaggaaatcacgcta

SEQ ID NO: 100 - DNA, 10269 bp, Chromobacterium haemolyticum
atgaccatggcacggctcatgactgatcttgccgacgcgggcgtcacgctgcgccgtcgcggcgatcagcttaagatacaagcgccgcagggcgcgctagacgaggcgctggtcgcgcggctgcgcgaggccaaggcggaactgttgcgcgtgctcgacgacgaggacgcgcgcgccgcgccgctggcgccggcgccggcgcagccgggcgaggccggcgacgcggcagccttgtcgccgggacaggctaggctggtcgcggcgacgcggctgggcgatccggcgatgtacaacgaacaggcagcgatcgaactcgcggacgcggtggacgcggaggctgtggcccgcgccttcgcgacgctcgcgcgccggcacgacatcctgcgcaccgttttcagcgacggcgagccggggcgacagacggttttgcccgagccgatcgtcgcgctgcaagcgtggacggtggacggcgacgacgctttgcgcgcgcgcgccgccgacttggcccggctgccgttcgtcgccggcgcgccgatgtggcgcgtcgatttgttctcgactcccgagcgtgccgccgtgctggtgctgaccatccatcacgccatcttcgaccgctggtcgatgagcgtgttgatccgcgatttcagcgcctatctcgcgtcgccggacgcggcagaggcttcggcgtccggcctcagctatcgagactattccgcctggcagcgccgctggatggcgtcggcggactacgccgcgcaactggacgcctgggtagacgacttggcggaagtggacgaggtgccggcgatacgcggcgaccgcgcgcgtccgccggcgatgagcgggcgcggcggcacggagcgtttcgagattccggccgcgtgcatggacgcggcggccgcgttctcccgcagccgcaacaccacgctgtttaccactttgttcagcgccttcgcgctgcttcaacatcgctataccggcgaagcgcgcgcgctgacgctgacgccggcggccaaccggcctttccaggccgcggaggaaatcgccggctacttcgtcaacctggtggcgctggccaccgaggtgggcgagggcgatagcttcggcgcgctggtggaccgggctcgcgacgccagcgcgcgggctttcgcgcgccagggcgtgccgctggacgccatcgtggagcggctgcgcgcgcgcggcggcccccggcacgaacagttcgcgcagacggtgtttgctttccagaacgtccgcctgccggcggtgcgcaccgcgagcggcgcggccgtgcccttcgatctggacagcccgttcgcgcgcttcgatctctatctgtcgatcgaaggcgacgagcgaggcactttcgcggtgtggcagtacaacaccgatctgtacgaggcggccaccatccgccagttgggcgagcactacctggcgctgctgcgcgcggcgctcgcttcgcccgacgcgaatgcgcgcgccttgccgatattgtccgccgaggaagaggcgcgtctgcgaggatgggggcggcatgagctgccgtatcgcgccgatgtctcgatagaccggctgtttcgcgagcgcgcggcggaccatcccggacgcgttgcgctggaacagggcggcgtgcgctggacttacgcggagcttgatcagtggtcggaccgcgcggccggcgcgctgcgcgcggcgggcgtcgaggcgggagcggtggtgggtgttgcgggcgagcgctcgccgcggctgctcgccgctttcctcgccgtgctgaaggcgggcgccgcctatctgccgctggacccgacttatccggccgcgcgcttgcgcgcgatgacggcggacgccgcgccggcgctgatgatcgtcgccgacggcttggacgccggatggctcggcgattatgccgggcaggtgttgagcctggccgattgcgaagccggcgccgcgcggccgctcctgtccgaagcgcggcgcgcggaggcggagggcctggcctatgtgatgtacacctcgggctctaccggccagcccaagggcgtggcggttccgcaccgcgcggtggcgaggctagcaaccggcggcggctatgcgcggctggacgcgactacggtgatgttgcagcagtcaccgctgggcttcgacgcctcgaccttcgaaatttgggggtgctggctgaacggcgggcggttggtggttgcggagccgggcatgccgtttctggacgcggcgtcgcgcgacggcgtcaccacgatgtggttgaccgccgacctgttccgcatggcggtggaagaggagccggccgcgcttggcggcctgcgcgaactgttgaccggcggcgacgcgctgccggtggcgagctgccgggcttttctcgaggcctgccccggtgttgcgctgatcaacggctacggcccgacggaaaacaccactttcacttgcagccatcgggtgacggccggcgacgcgcggcgcggctcgattccgattgggcggcctatcggcaacaccgaggtgcgggtggtcgacgccggaggccgcctggtgcccgtcggcgtgcccggcgagctgtgggcgggcggcgacgggctcgcgctcggctatctggggcgcgccgacttgacggcggagcgtttcgtcgccgctccgccgccggacggcggacgctggtattgcaccggagaccgcgtgcgctggcggcgcgacggggtgttggagttcctgggccggatcgacgagcagatcaaactgcgcggttatcggatagaactgggcgagatcgaggcgacgctgggccaccaccctgggctgagcggctgcgccgtcgcgctgcggcgcagcgccgcggacgagaagcaattggtcggctatctggtggcgaggccggattcgggcgaggccgcggattcggccgcggtgcaggcgtggctggaggcgcggctgccggcttatatggtgccgcgcgcctgggtgtggctggatgccttgccgcagtccgccaacggcaaagtggaccgcaagcgtctgccggagccggtggtcgagacgggaacggcggcggcggagaccgaggccgaggcggcgctggtggatatctggcaaggcctgctggggctggaacgcgtgggagtgagggacaacttcttcgcgctgggcggcgactccatcctgagcatccagatggcgtcgcgggcggcggagcggggcttgcgcctcagcccgcagcaagtgttccgctatccgacgatagccgagctggcggcggaaggctgcgcggcggaagacgccggcgcgcaggcggagcagggcgaggtagtcggcgaagtgaggcccggcccgatccaggcctggtatctggactggccgggcacggactgggaacagttcaaccagggggcctatctgggcctgggcgggtccgtcgacgcggaggcgctgatcggtgcgctgcaggcggtggcgcagcggcacgatgcgctgcggataggctggcggcgggatggagagcgctggattcaggaaagcggcgcgggcgaaccggtggaagtgaaggccgtggacttgcgcggcctggccgatgcggaggccgcgctggagcgggacgccgccgcgttgcaagccggtctgcgtctggacggcgcgagcctgtgggcggcgcggctgtaccggctggacgaaggctggcgcttgctgtggctggcgcatcacgcctcggtggacggggtgtcatggcggattctgctggaagacctgtggcgggcctacgcggcgctgagccggggcgaggcggcgacatggccggcgaagacggtgtcgtaccaggcgtggtcgcagcggctgtgggaatgggcggaagccttgccggaatcgacgctgcgctactggcgagagatggacgcgccgggcatgcccctgccgggtttcaacggggccgaggaaaccgtcgcggccgagtcgcgggtctcgctgcagtgggacgcggagacgacggaacgctggctgcggcaagcgggcgaggcttaccggatgcgtccggaagaattgctgatgaccgcgctggcgcgcgccttgcgccaatggacgggtgctgaggaatgcgtgctggacctggaagggcacggccgtgacgggctggcgggcgtggacgtgtcgcgaaccgtgggctggttcaccagcctgtatccgctgcggctgccgctgagcggggacttgccgcgggatctgaaattagtgaaggagcggatgcggagcgtgccggacggcggcatggcttaccacgcgctgcgttatggcggccgcgggtcggagctgggcggccacgcgcgcacggtgtgtttcaactacctgggccaatggcggctggaggagggcggcgagccgcgctccacgtggttgggcgagccgccgggcgggacgcgcggggcggggatgaggcggcgctacggactggatgtggtggcgcaggtgcacgaagggcgcttgcgggtggactggctgtatagcgcgtcgcgacagcgggaaggcgcgatcacggcgctggccgatggcttccgcgcggaactggacgcggtgctggcgcattgccagtcgccggagtccgggggtctgacgccgtcggacctaccgcttgcccatctggaccagagcgagatcgacgcgatcgagcgcgagcatccgcggctggaggccctgtacggccttacgccgctgcagcagggcattttgttccattccattgccgacgacggcgcgccgctctacgtggaacaactgcactggaaaatgagcggggctttcgatgcggagcgcttccgccaagcctggtttgacgttgcggcggctcacgccgcgctgcgcaccaccttccgctggcgggggctgaagagcgcggtccaaatcgtccaccctcgtctggacccggactgggacacgctggattggggagccttgtccgtcgaggcctgcgtcagccgcttcgacgcgctgcgcgagctggaccgtgaacgcggcttcgatctggaacgcgggcccttgctacgcggcaccctgatccgcgaacccgacgacgcttggcgctttctatggagctaccaccacgcggtggtcgacggttggtcggtgcccttgatcctgaagcaggtgattggccgctacgccgagctgggcgtgggcgaggcggccccgctgccgggcagccgttttctgcccttcgtgaactggttggccgcgcgggacgagagcgagcaggccgcgtactggaaacaggtgctggaagggatagaggagcccacgcccatcggcttcgcatctccggcgcgcggtcctcaagcacagggccagggccggcgcactttcgtcttcgacgcggcgctgcgcgagcagctagaccgtgccgcgcggcgggccggcgtgacccgcgccagcctgctgaccggtgcttgggcgttgacgttgggctatgccggcggcgggcgcgatgtggtgttcggcaccaccttgtccggccggccggcgaccttgccaggcgtcgagcggatggttggccttttcatcaacacggtgccggtgcgcgtgggcatggacgacgacgcgagcgtatcagaatggctgcggcagttgcatgaacagcagagtgagcgggccagattgggcgccgcctcgctcacagacatccagcgctgggcgggctacgagggcggcgagctcctgagcagcttgttcgtggtggaaaactatccggtggatcggacgctggcccggggcgatgccggtctcgacgtcagcgagttcgcggcggccgagacgcgcaccaattatccgctggtcggccagctgattccgggcgaggagaccgtgctctacgtcgatttcgacgcctcgcgttacgacgaggagagcatagggcggttaggcgcgagctttatgcacctgctctcccagctcgccgcgcagccggacgcccggcttggcgatctgaccctggtcgacgacgacgaggcgcgcaggctgattcacgactggaacgcgacgccgccggtaggcgaaggctatctgctgcatgcgggcatagagcggcacgccgtgctgacgccgctggcgccggcgatcatcggcgtggacgaagcgatgaactaccgcgagttggccaacgagacgctgcgcacggcgagggccgtggcggcggcgggcgcgaagcgcgaaccggtcgccgtgctgctgcctaggagcgcgcgcgcggtcgccgcgtactcgggcgtgatgcgcgccggctgcgcttatgtgccggccgagccggcgatgccgccgggacggttgcgcgatctgctggccacggtcggctacgtgctgacgacgcgcgagcatctgccgatgttggacggcgtcgccgcgcgggcgatcctgatcgacgaaacgccgccggccgatgtcgcgctgccggacgcggcgcccgacgatctggcctatgtgatgttcacctccggctccaccggcaaacccaagggcgtgatgatcagccaccgcgcggcctcgctgacgatagaggttttcctgcgccgctatgagataggcgcgtccgaccgcttgatgtgcgtgtcggcggcgggtttcgacctgtcggtattcgatttcttcggcgcgttcgcggcgggcgccgccgtcttgctcgcgccggaatcgtcgacgatcgcgccagccgtgtggctggaactgatgacgcgcgagggggcgacggtatgggaatccgtgccggcggtgatggagctgttgctgcttgagtgccggcaaagcgggcgcgcgctgccgccttccttgaagctggcgatgttgagcggcgaccgcgtgccggtggggctgcccgcgcagatccgagcggccgcgacgtccgatcccgaggtgctggcgctgggcggcgccaccgaggcggccatctggtcgtgctggtacgacacgcgggaactggcgtccgacgccgccttcgtgccctacggccgccatctgccggggcagcggctttatgtgttgtcctcctcgctgcaagcggtgccggggggcgtgccgggcgatctgtggatcgccggcgcgggcgtggcgctgggttatctcggccagccggatctcactgcttaccgttttgtcgacaatccctttgtgccgggcgagcggatgtaccggactggcgaccgcgcgtgcgttcttgccgacggaaatctcgaattcctgggacgagtggacgaccaggtcaagatcggcggcttccggatcgagatcggcgaaatcgaagccgcgctagcggtggcgccgggcgtggagcgcggcgtggcctcggtggtcgagcgaggcgggcggcgaatcatcgccggctatgtgctgttgctgccgggcgcgagtttggatcttgccgcggttcgcgacgcgctggcgcggcgcttgccgccctacatgctgcccgcgtcgatcatggcgctggacagcttgccgctgagcgccaacggcaaagtggaccgcaagcgtctgccggatccggtggtcgagacgggagcggcggcggcggagaccgaggccgaggcggcgctggtggaaatctggcaaggcctgctggggctggaacgcgtgggggtgagggacaacttcttcgaacttggtggtcattcgttgatgatcgttagtctgattgagcggctacgtaccctcggttggaggctggaggttcgcaccgtgtttacctcgccggtgctggccgaaatggcccaggcgatcagcgcccagccgaacgactttcctactttcacggcgccacctaaccgcattcccgtcggcagtacagtcatcactccggacatgctgccgttggtcagcctatcccaaaccgagattaatgcgattgtcgacactgtgctgggcggggctgccaatgtccaggatatctatccgctgtcgccgttacaggagggcatcttgttccatcacctactgcaaaccgaaggcgatgcctatctgctgcgcagcgtgatcgccttcgatagccgcgcgcggctagacaacttccttgccgccctgcaacaagtcatcaaccgccatgacatcctgcgtactaccgcctgctggcaggggctggcgcaaccggtgcaggtagtctggcgtgaggccttgctgtccattgagacctttgtcccaacggacgaggacgacgtgctggcgcggttgttagctcacaccgacccgcgccaacgccgtctcgacttgaaccgtgcaccgttgctcgccattggcgttgcccacgatcagacgcaggacgagtggctgctggccttgagtttccaccatctgatcgccgaccatctgacgctggagcggattgtccgcgaaattaccgtgatcctacatggaggggcagagaccctgacagctgccttaccctaccgcaatttcatcgcgcagaccttaagcgtaccgactgaggtgcatgagacctacttccgtgaagtactcgctgatgttgacgagccgacggtaccgtttggcattctgaatgtgcagagggacggtgcggatgtctctgaatccggtcttctgctcgaggtgacactggcgcaggcgattcgtactcaggcgcgtcgcctaggggtgagcccgggcgtgctgttccatgtgggctgggcccaggttctggcccagaccagcgggcgcgacgacgtggtttttggctcggtgttacagggccgtctgcaaggttctgccggggccgaccacgcgatggggatgttcatcaacacccttccggtacgggtatcactggccgcgcgtagtgtacaggaggtggttcaagcgacctatcacgggctgatgggcctgctcgagcacgagcaagcaccgctggccttggcgcaacggtgcagcggggtggagccgccgctgccactgttcagcgccttgctcaattaccggcatagtgttgctggcgaagctgaggcggtttgggagggcatgcgtttgttgagctcggaggaacgcaccaactatccgctcactgtttcggtggacgacttgggagagggcttcaacctcaccgcccagacagtggcaggcgtcgattcccaccgtctggccgcctatctggccactgcgatggagggcttggtcgaggcgttggccaccgatccgcaacaggccattctgaatctgcctatcctgccggcagccgaacggcagcaactgctagtggacttcaatgccaccgaggcggagttcccgcaggacgcgctgatccatcaactgttcgaggaacaggtgcgccgcacgcccgaggcgacggcggtggtgttcgaagcacagtcgttgagctatggggaactgaaccgtcgcgccaatcagttagcacatcatctgatcgggctgggagtgcgtccggacgacagggtggcgatctgcgtggagcgcagcctggagatggtggtagggctgctgggcattctgaaatctggtggcgcctacgtgccgttggacccgtcgtatccggcggagcggctggcatacatgctggacgatgcggcgccggtggcggtgctgacgcagcgtcatttgcttgacacgctgggggcggcgtgtccagttgtattgctggacacccgaaatccgtacctggaggcgcaaccgggtgacaatctggacgcagaggcgctgggcctgacgtcccgccatctggcatatgtgatctacacctcgggctccaccgggttgcccaagggggtgatggtcgagcatcgtagtctaagtaatctgatcgctactcaacgagatactctcgcgatccagtcaaacagccatgttctgcagttttcctcaaatagcttcgatgcttgcatttgggagtgctgcatggctttacagggaggggccagtctccatattgcccagcgtaccaatcttctgcctggtacgacactattaagcagcctcgaatccagtgccattacccacgcgcttttgtcaccaacagtacttgcggccttggaatccatccctgccacattaaaaaccctcattgtgggaggggaggcttgcccgccatcgttggttcagcgctgggcaaaaaatcggcaaatgatcaatgcctatggccccacagaaagcaccgtctgcgcaacgctctatcgatgcgatgccgaggaggggggagcgccgtccatcggtcgtccgattgcgaacacccaaatctatattctggatccccacggccaaccggtgcctctcggcgtggccggcgag

SEQ ID NO: 101 - DNA, 10920 bp, Chromobacterium haemolyticum
atgaacatgacaagcacaccgaacctcaaagaccagatccaggacatcctgcccctgagcccgctgcaacgcggcgtgctgttccacaccttgttcgcgcccggctcgccggtctatttcgagcaattgatctgccggctggacggcgcggtggaccccgccgccatggccgacgcgctggagcggctggccgagcgccaccccatcctgcgcaccgccttcgtcaccaagggccaggccgagccccgccaagtggtgtttcgccacgcgcggacgccgctggacgtccacgactggagccgggacgaccccgccgagcgccaacggcggctggaagcactgctggacgaagaccgccgccgcggcttccagctgaaccggccgccgctgatgcggctgaccctgctgcgctacgggcaggaagaatggcggctgatctggagccaccatcacatcctgctggacggctggtcgctgcccatcctgatgcgcgattacttctcgttgctgtccggcgcggcgctgccctcggcgccgccgcccttcgccgcctacctgagctggctgggccgccaggaccaggacaacgccgccaagcgctggcgcgccgcgctgggcgatctggccgcgcccacgccgctgggcctggaccggccggcgctgccaggcgcgctggccggcgccgacgtcggccagatcgagatgcggctggactaccgcgccgacggcgacctcgccgccgccgccgaacgctgccgggtctcgccgggcagcctgctactgggcgcctgggccatcctgctcagccgatacagccgccaggacgacgtggtcttcggcctcaccctgtccggccgggccattgatctgcccggcgtggacggcatggtgggcctcttgatcaactccctgccgctgcgcttgccggtgccggccgacgcagccctgccgcaatggctggccgaggtgcaacgccgtcagttggcgctgcaatcgctgtcgcacagcgatctggccgaagtgcagcgccacagcggcgtgccgcgcggccagccgctgttcgaaaccctggtggcgatagacaacttcccgataggcgaggccctgccctcggacggcttgggcttccggatatcggacgtctcccagcgcgagcgcacccactacccgctgaccctgaccctggtgccgggcgccgacgggctgagcttgaagctgggcttcgaccgcgctcgagtggacgatgctccggccgcggcgctggccgagggctatctggaactgctgcgccagatcgccgcgcggccggacgccgcgctgcgcgagttggggctggtccgcccctcacccgccaagccgtccgtgccgggcccgcgcggcgggccggacaccctggccgcagccttcctggccgccgccgagcgttttccggaccgcatcgccgtcagcgacggccccgcaacgctgagctaccggcaactgcgcgcccaggccgccgccatcgcggaacggctgcgccaagacggcgtgcagcccggcgtcacggtgggcatctgcctgccgcgctccgccggacaaatcgtcgccatgctgggggtcacgctggccggcggcgtctatctgccgctggatccggactatccggcggagcggctggcctaccaactggccgacagccaggcgttgctcacgctgaccgacgccgaactcaggccgcggctgccggcggaacaccgctgcctgtcgctggcggagataggctgcggcgccaggccggcggcgcggccgcccgccggcctggaagccgggcacggcgcttacgtgatctacacttccggctccaccggccagcccaagggcgtgctggtttcccaccgcaacgtgctgcgcttgttctccgccagcgcccgccacttcgccttcgacgaaagcgacgtctggagctatttccactccttcgccttcgatttctcggtgtgggaaatctggggcgcgctgctgcacggcggccgctgcgtggtggtgccgcgcgaactcagccgcgatccggccgccttcgtcgaactgctgggccgcgagggcgtcaccgtgctgaaccagactccgtccgcgttcaagctggcgatagcggccgaagccgccgcgccgctgccgcggccatcggcgctgcgctgggtgatcttcggcggcgaggcgctgcggctggcggaattgagtccgtggctggagcggcacggcgacgacagtccgcggttggccaatatgtacggcatcaccgaaaccaccgtgcacgtcaccttccgccgcatccgcgccgccgatctcaaggccggcggcgagctcagcccgataggcgaaccgctggacgacctgagcctggaactggccgacccctgcggccaccccgttcccttgggcgcgcccggcgaaatcctggtcggcggcgccggcgtcagcctcggctatctgaaccgcccgcaactcaacgccgaacgctttcccggcgtcggcgcggaacggctctaccgttccggcgacctggcgcgacgaaccgccgacggcgaactgctgtactgcggccgcatcgaccatcaagtgaagatccgcggtttccgcatcgagctgggcgaagtgcgcgcggcgctgctgagccatccggcggtgcgcgatgtccatctcgtcgccgccgacaaccaactcatcgcctatctgctcgccgacgaccccgccgcggccggcgccgaaaccctgcgccgccatctggccgcgtgcttgccggcgcatatgattccggcggtcttcatcgcgttggccgagtttccgctcaccctcaacggcaaggttgacgctcgcgcgctgccctcgccgcaaggcgcgcgctcggcgctggacacgccctatgtcgaagcggccacccccaggcaaaaactgctggcggagatctggcgccaggtgctggacctgccgcgcgtaggcatacgagacaactatttcacgctgggaggagactccatccgcagcgtgcgcatcgccgggctggccaaggaacgcggctgccccttgaacatccaggacattttccgccacggcaccatagcagccatcgtcgaagcgataggcgaagccgaaagcacggccgcgccggacgcggcactgccgcccttcgcgctgatagacgccgcggaccgcgcgcggctgccgcccgaggtggaagacgcgctgccgctggccagactgcaggccggcatgctgttccacaatgaatacgacgacggccgcaacctgtaccacgacgtgttctcccaccggctgcgcgccgacatcgacccggagcgcctgcgccgggcgctggcggagctgagccgcgaacacccgttgctgcgcaccggcttcgcgctggccggctactcccagcctttgcaactggtttggcgcgagctgacgcccagcctggacatcgacgacctgcgcggcctttcgccgcagcaaagggacgacgccgtcgccagccagctgcgacaactaagcgaacagcgcttcgcgccggagcggccgccgctgctgcgcgtcggctgcctgcggctggccgacgacgagtggcagctgacgctggccttccaccacgccatcctggacggctggagcgtggccaccttgtgcgcggccttgttcaaacggatgcgcgaccagggcggccccgcgccggcaccgcgcgcggccttccgagaattcgtcgccgccgaacgcgcggcgctggccgacccggcccaacgagactactggcgcgcgcaactgaacggcctgccgtccgccgccatcccgcgctggcctcaacgcgttgcgccgacgggcaaggccagggtgggatcgcgggaaacgcgcttgccaagcgccgccgccgcggcgctgatccggcaggccgcggacagcggcatgccgctgaaaaccctgctgctggccgtgcacgcccgcgtgctggcctgcttgtgcggtcagaacgaaatcgtcaccggcctggtcagcaacggccgcccggccgacgccgacggcgcagaagccttgggcctctttctcaacaccctgccgctgcgcgtccgcgttggcggcagttggcgcgcgctgctggcggaaaccatggcggcggagggaaacagtctgccccgccgcttcttcccgctggcggaaatcctcaagctggatgaggccgcccgcttcgacgcctcgttcaactatgtggatttccacgtctaccgcgaactgagcgagagcggcggcctggaggtgctggacagcagccgccaggaagcggtggacatcccgctggccgtcaccttcagcgccagccgcgccgaaggcgccgtcaccctgggcttttcctacgaccgcgccgccttccccgacgagcaagtagccgccatcggccggctctacctggccgccgccgccgcgctggcgcgagatcccgacgccctctgcctggatgtcccgctgacggagaccgctgtcgagccgctccgcggaccctccgccggcctcgcggccttctctgtgccgcagacggtcgccgccatcgcgcggcggcaaccggacgcgcccgccgtcgccggaaacggcgaagcgctgagctacgcccggctggacggccaggccaaccggctggcgcgccggctgctggcgcatggccttggcccggacgcggtggtggcgctggacttgccgcgctcgcccgaactggtggtggcgatgctggcgaccttgaaagccggcgccgcctatctgccgctggaccgcggccagcccgaggcccgccgccgcgacatcctgcaggaggccgccccggcgctgctgctcagcctggaccccgccgcttacgcgccgcccggctgcgccgtcttgcaagcaaacctggccgaagatctgaacgatgaagacgccgccgcccccgccgcgcccgcccatggcgacgcgctggcttatctgctgttcacctcaggctccagcggccgtcccaaaggcgtcgccgtcggccgcgccgcgctgggcaaccacatggcctggatgaaccgccgctacccgctggacgcggacgacgcggtactgcagaaaaccccggtcggtttcgacgcctcggtctgggagttctgggcgccgctgacccagggcgcgcggctgctgctggcggccgaggacgggcaccgcgacccggactacctgatccgcgccgtgcgcgaacaaggcgtcaccgtgctgcagttggtgcccagcctgctggccgtgctgctgtcgacgccggacttcgccggctgccgcacgctgcgccgggtcttcgtcggcggcgaagcgctgccggccgccacccaggcccgcttccacgccgcgctggacatcccgctggtcaacctctacggccccaccgaaaccgccatcgacgcctccagcgcggaatacctgcgcacggacccgcccgctgccgccatcggcatcggccaccccatagacggcgccgtcttccacgtgctggacacccgcctcaatccggtgccgcccggcgtgcgcggcgaactgtacatcgccggctgcggcctggcgcgcggctatctgggccagccggcgcagaccgcgcggcgcttcctgccggacccgctgtcgccgttgcccggcggccgcatgtaccgcagcggcgacatcgtgcgcctgctgccggacggcgtgctggaatacctgggccgcgccgacggccaggtcaagctgcgcggccagcgcgtggaactggaagagatcgaagccggcctcgccgcctgccccggcgtgcgccaagccgccgccgcgctctaccgcgaccgctccggcgcggacaagctggccggctatgtcgggctgacgcctgaggccgaggccggcgactggcgcgcggccatcctggcggcgctacgcctgcgtctgccggaatacatgctgcccgcgcagttgatcgcgctacggcaatggccggtcggcgccaacggcaaaaccgaccgcgccgccttgcccgcgccgcagacggacgcgacggccccaaggcccagccgcgcgcccaataccccagaggaacaggctttggccgcgatctggcggcaaacgctggaccgcgaagacatcggcgccgacgacaacttcttccaattgggcggggactccatcctaggcctgcaaatcgtggctcaggcccgtcaggccggcctgacgctggccgcgcgcgacatcttcagccaccccaccatcgccgagctggccgcccaagcgcgcccggcgcggcaggaagccaagctggaggacattccgcccggcgctccgcttccgctgacgccggcccaaggctggttcttcgaacgcgtcgactccctgccgcgtcccggccactggaaccaggccctgctgctgagcgtggccgccggcatttccgcgccgacgctgcgcagcgccctgctgcgactggaacaaagccacgacgccttccgcctgcgcttcgccgccggcgccgaaggctggcgtcaacactacgcgccgcgcgaggccttgcgcgaagaagactggctggaacgcgtcgatctgagcgcgctgcctgccgctgatcgcgccgccgccatcgaggcccgcgccgaagcggcgcagcgcgagctggacctggaacgcgggccgctgttgcgagccgtgcacttcgactgcggcgacggcgaagccggccggctgctgttgctcattcatcatttgattgtggacggcgtgtcctggcgcgtgctgctgcaagatctcgccggcctgcttgccggcgtcgcccccatgccggcgaacgtcggcttcggccattgggcgctgcgcccgttcgagccctccgccgaagaacgcgcttactggctagaccaggcgcggctggccgccgacgcggtccgcgtcccgctgacggcggaggcggaacgcgacaaccgctacggcatgaccgacaccgtggagctgtcgctggacggcggcgaaaccgccgccctgctccgcggcggagcgctgcgcgccagcgccgaggaaatgctgctgacggcggcgctgggcgcgctgcgcgactggctggacgccgacgcgctggtcctcaccatggaaggccacggccgagacgacgaggccctggacctctcccgcaccgtaggctggttcaccgccatgtatccgctgaccgtgaccggcctggccgaggcttcgccgccgcggctgctgcgccgggtcaagcaggccttgcgcgcggtgccggccggcggcgccggctacggcgcgctgcgtcaggcggccgacgcccgcgcgctggccgccatgccggaaccgcaaatcgccttcaactacctgggccagttcgacgccagcctgccagccgacggcgcgctggcgcccgcgccggaatcagtgggcgcgatggaagacccggacggcttgcgcccccggctgatcgacatcgtggccctggtcagcgacggcaaactgtccctacgctggaactacggtcgcgccacgctgccgcgcgcgacggtggaagccctcgcccggcaaatgcggcagcggctgctggcgctgctgagcctggacgcggacgccgcggcggcggcgctgacgccggacgacttcccgctggccgcgctggatgaagccggcctgcccgcggcgctgggccagcgcggcgacatcgtcgacctgtggtcgctgacgccggtgcaggaaggcatgctgttccactcgcgaatggaagcctcttccggcctcgccggcgtctacatagaacaagtagtcgccgaactggacggcgcggtggacccggccttgctgcgccaagcctgggagcaggtgctggcgcggcacgacgcgctgcgcgtcagcttcgcctgggaaggcttggccgcgccgctgcagcgggtccatcgcgcgcccgcgttgccgttctcggtcagcgaaacgccggacgagaccgcgctggaacgctatctggccgacgaccgcgccgccggcttcgcgctggacgccccgcccttgatgcgcctagcgctgctgactcggaacggcgcgccttggcggctggtctggacccatcaccacgcgctgctggacggttggtccatggccgtcgtcttcgacgaggcgctggccctgtaccgcgggctgagccaaggccagagcgcggcgctgccgccggcgccttcgttcggacgcttcatcaaatggctgcgtacgcacagcgaccgccaagcccagaaagaattctggcgcgactacttcagcggctacgccgccgcggccgatctggccctgctgccggccggtggccctccccagccgcgcgcccattcactgcggctggactccgcgctgaccgcggagctgcggcggacggcgcgagagcgcaaagtcacgctcaacaccttgttccagggcgcgctggcggtggctctgtcccgcgtcggccgctgcgacgacctggtgttcggcgtcaccatggccggccggcccgaatcgctgcccggctgcgacgccgccgtcggcctgttcatctccaccctgcccttgcgcgccgactgctcggctgctcaagcggtggacgattttctccaccggctgcagcacgcccagagccgtctggggcctttcgagtctagcgccctggtggacatccagcgctggagcggcctgtccgcgcgccaggcgctgttcgacgtggtgctggtctatgagaactacccgattcgcgcctcggtcggcgacgccgcccaagcgctgcgcgtgggcgcggcctccgcgcgcgagcagtccaactacccgctgaccctctacgtcaaaccggacgccgacgccattgagctggacggcgtattcgacgccggccgcatcgaagcggaacgcgtcgcggcgctgctggaagcgcttccgcggctgctgcgtcagatcgccggcggcgcgacccgcgtcggcgacctgcgtctggccgaaccgacgcctccggccgccttcccgccgccggagcgcggcgacaacgtgctcgccatgttgaccgccgccgcgcggctcaacccggacaagatcgcggttgccgccgaggacggcgagctgagctaccgccaactggtgaatggcgcgcgcgcgctggcgcgccggttggcggagcgcggcgtcgctcccggcgacaccgtggcgctggccctgccgccggacggacgcgcgctgaccgccctgctgggcacgctgtgggccggcgcacaatacctgccgctggacccggcgctgccgccgctgcggcgcgacgccatcctggaagacgcccgccccggcctggtcctcgtcgacggcgagcagaccggctggcccgcgtccgccaaactgctgacgctgccgacgcctctgccgcaagccgacggcgacgacgctcccttgcccggcgacgcgctccacccggaagggccggcctacaccctgttcacctccggcagcaccggccggcccaagggcgtgcagatcgtccatcgctcgctggccaacatcctgcggcatttcagcgccgaacccggcttcggcgcggacgacgtgttgctgtcggtcaccacctggtccttcgacatcgcggcgctggaactgctgttgcccctggtccgcggcggcaccgtcgccatcgcgccggcttcggccagcggcgacggcccggcgctggccgccgaggccgcgcgccgcggcgccggcgtgatccaggccacgccggccagctggcgcatgctgctggaagccggctggaagcctgcgcccggcctgcgcgcctggtgcggcggcgaggcgctgcccgccgacctggcccgcgagctgctggacgccggcgccgcgctgtggaacgtctacggccccaccgaaaccaccatctggtccgcgctgcaccgggtcgacagcgcggaactgccgccgccggccggccacgccgtccgccgcaccacgctgtgggtagccgaccaccacggccagccgctgccgccgcaactggcgggcgaactgcagatcggcggagacggcctggctttgggctatctgggcgcgccggcgcaaaccgccgcccgtttccgccccgatccgctggccggccggcccggcgcccgcgtctaccgcagcggcgatctggcctgcctgcggctggacggcagcgtccgcgtgctgggccggctggacggccagaccaagctcaacggcttccggctggagttggaggaagtggaaaccaggctgcgcgaactgcccggcgtgcgccaggcggcagcggccgtccgccgcgacccgcaaggccacgcccggctggtggcctatctggtgccagacggcggcggcgcctggcgcgccggcgacgaagtcgatcccgccgccttgcagcgggtccgcgcccagctgtccgccgcgctgcccggctatatgctgcccagccgcgttgtcaccctggaccagttgccgctgaccgccaaccgcaagctggaccgcaaggccctgcccgaaccggccgccagcgcgccgacccgcgccggcagcgccccccagggcgcgctggagcaagcggtgtgcgcattgtgggaagaagtgttcgaacgcgccgacatcgccgccgacgacgacttcttcgaactgggcggccattcgctgctggccacccgcatccaggtgcgcgtcaacaaaatcttccggcagacgctgccgctgcgcgccaccttccacgcccaaaccccgcgcgccctggccgcgctgctggcggagcgcgagtccgcgcccggcctggccgccaagatcgccgccgtctacttgaagctgcgcggcatgtccgacgccgagcgcgacgcgctgcgccgggccgccgctcaaccctccaccatggaaaccgcagaa

SEQ ID NO: 102 - DNA, 1170 bp, Chromobacterium haemolyticum
atgaatacacgagtgaaggcattcgccgccgttgaagcggcgctggcggaaccggaggcggcgctcgccaacggtgatttcgaaaccgttgaacggctgatgagcggcatccgcgagagcaaccggatgaaaggcgtctggctgccgcaggtgccgcgcgcggatggcggcctgggcttgagcctgcttgagctggtggaagtaggcgaactgctgggcgcctcgccgctgggccattacgcggtcaactaccaagcgcccgacgccggcaatatcgacgtgctgctggagtacgcgactccggcgcagcgcaggcgttggctggagccgctgttgcgcggcgaagtgcgcagctgcttcgcggcgacggagcccgagtccgcggggtccaacccctcctcgctgaaaacgacggcggtgtacaaggacggcggctggcacttgagcggccgcaaatggttcgcgtccggcgccgacggcgcgggcttcgccattgtgctggccgtcaccgacgaggccgcgccgctgcacgcgcgcaccagcaccttcatcgtgcccaccgacgcgcccggcttccgccacgtccgcaatctgcgcgtgatgggcgacgagggctgcggctgggccagccacggcgaactggtgttggacgattgccgggtgggggaggatgcgatgctgggcaagccgggcgagggctttgtcgtgttgcaggcccggctcgccactggtcggctgcatcattgcgcgcgctggataggcgtgtgcgagcgcgccttcgccatcatgtgccggcgcgcgtgccgccgggagctggcggcgggcgagttgttgtcttcgcgccagaccgtgcagaactggatcgccgagagccgcgcgtcgatagacgccgcgcggctgctggtgacccaggcggccacgcggctgcaaaaccgtcatgagcgcgcgcagatcgacatctcgatcgcgaagtttttcgtggccggcgcaacgcagaccgtgctcgatcactcgctgcaggtgcaaggcgcgttgggtgtcagcggcgacacgattctcaacgtgttgtggcggcatgaacgagcggggcggatctacgacggcccggacgaggtccacaaagcgctggtggcgcgtcatgcgctggccggcttccgccgggagctgaca

SEQ ID NO: 103 - DNA, 963 bp, Chromobacterium haemolyticum
atgagcgagcggatcgcggagcgggcgatggcggcgctgggccgctccggcgtgggcgcgcgcgcgacgcgcgtcggcggcggccgggccagcgaagtgtttttggtgcaggggggcgacagcgagctcatcgcctactggctgccggagggcggcgcgcgggaagcgcggcgtcgctttgcgctccttgagcggatggctggccagttccggctcgcgcccaagccgctggcggtcgatgaggacggcgacgccgccttgctgctggtcgaaaagctggagggcgtcgcgccggccgcttgcggaccgctcgcgcccgacaccgtgcgccggctcgcggaaaacttcatcgcgacgctggcgggcctgcatgcgctggaggtggcgccggccgaccgggccctcgactatctgcgtcgcattctgagcgagtggcggcggcgctggaacgcggaggaggcgggcgaggcgatagacgccgacttcagagcggtggcggactggctgaccgagcggatgcccgagaccgaacccgcggcctggctgcacaacgactacaagctggacaacatcctcgtcgatccgggcgaccccgcgcgggtggtgggcgtcgtcgactgggaactggccgccgtcggccatccgctggccgaccttggcgccgcgctcgcttactggatagagagccgggactcgtcgctgctgcggctggacgcgcccgggccgagttgcgcgccgggcgcgccgacgcgcgaggcgctggtcgatttgtacgcggcggccgccggacgcgaggtgacggcgcccgcctattggtatgcctacggcctgctgcgtttggcggtgatcacgcagcaactggcgctgcggcggcgggacgaagggctgcgcgtgccgcgcgccaagctgatcgtgcgctggctgctggaccgcgcagcggaagcttgcggcggcggccgccta

SEQ ID NO: 104 - DNA, 957 bp, Chromobacterium haemolyticum
atgaaggccgcccgcgcgccatcccattcatttccaatcaaggacactcgactcatgaattcagaaacctcctcaatgttgctcgacgtcgtcgtgataggcggcagtcacgccggacaatccgccgcgctgcagatcgcgcgtgcgcgccgccgcgtgctggtaatcgacgccggcgcgcgccgcaaccgcttcgccgcccaatctcacggcgtgatcggcctggatggccgttcgccggacgcgatcgccgcggacggcaaggcgcaactgctcgcttaccctaacgcgcaatggcgggcggacagcgtggtcctggcggagcggaacgacgccggctatacgctccgctgcgcatccgggcaagactaccgagcgcgccagctggtgctggccttcggcgtggtggacgagctgccggagctggagggtctggaggaacgctggggggaaagcgtgttccactgcccttactgccacggctacgaattggatcggggccgcatcggcgtgctcggcagcgggcccttgtcctatttgtcggcgatgttgatgccggagtggggccagactgtcttcctgaccgacggcggcttcgagccggacgaggagcagcgcgaggcgctggcgcggcggggcgttgagatcgtgcgcgaccggatcgcgcgcattgccgaccgcgccaccgtcgagcttgccgatggacgccggatcgcgttcgacgggctgttcacgatgaaccgcttccgcttgtccagcccggtggcggagcagctgggctgcgtgatagaggaggggccgctggggccgtatgtgcggaccgacgacgcgatggaaacatcggcgccgggcgtgttcgcctgcggcgacatcacgcatcggggcggcaccgtggcgctggccatcggcaacggcgcgctggcgggcatcgccgcgcatcgcaaactggtgttcggg

SEQ ID NO: 105 - DNA, 1116 bp, Chromobacterium haemolyticum
atgtgcggaccgacgacgcgatggaaacatcggcgccgggcgtgttcgcctgcggcgacatcacgcatcggggcggcaccgtggcgctggccatcggcaacggcgcgctggcgggcatcgccgcgcatcgcaaactggtgttcgggtgaggcgcgcgcggggcgcgacggcgcgtttctctttcttgctaccgggaatcgatcaatgagttggcaaaacctatgtttctcctggctgttgcgcagaacggccaaatccctgacccgcaagcccggcctgaccgcccaggaaatgcgcgaacgcagcgcgaaatgggcgcgcggcgaaatcaagccgccgcgcggctggcgggtgcgcaagctggacgctcaggcgctgcgaggcgagtggatagagccggaggccgccgagcggcgcgaggcgagcgggcgggtgatcctgtatctgcacggcggcggctattgcttctgctccccggtcacgcaccggggcgtggccgccgagctggcgcgggaagcggacgcgcgggcgttttcgttggattaccggcttgcgccggaacatccgttccccgccgccgtcgacgacgcgctggcggcgtatcgggcgctgctggacgagggcgtggcggcggaccggatcgtgatcgccggcgattcgtcggggggcggactggcgctcgcgctgctgctgtcgctgcgcaacgcgggcgcgcccttgccggccggcgcggtcttgttctcgccgtggacggatctggcggcgaccggggcctcgctggaagcgaacgacgcgtccgacgtgatgctgagcgcggtggcggtgaggaatttctcgcgctactaccttggcgacgccgccaccgatcatcccatcgcctcgccgctctacggcgagtacgcgggcctgcccgatctgttcatccaggccagcgacaccgaagtgctgttggacgacgccgcgcgcgtggcccgcaaggcgagcgcggccggcgtcgcggtggacttcaaggtgtggcggcggctgccgcacgcatgggccaccttggcgcccatgctgccggaggcgagggcggcgatcaaagaggccggcagtttcgttcgcaaggtggcgcca

SEQ ID NO: 106 - DNA, 1656 bp, Chromobacterium haemolyticum
atgtttctcctggctgttgcgcagaacggccaaatccctgacccgcaagcccggcctgaccgcccaggaaatgcgcgaacgcagcgcgaaatgggcgcgcggcgaaatcaagccgccgcgcggctggcgggtgcgcaagctggacgctcaggcgctgcgaggcgagtggatagagccggaggccgccgagcggcgcgaggcgagcgggcgggtgatcctgtatctgcacggcggcggctattgcttctgctccccggtcacgcaccggggcgtggccgccgagctggcgcgggaagcggacgcgcgggcgttttcgttggattaccggcttgcgccggaacatccgttccccgccgccgtcgacgacgcgctggcggcgtatcgggcgctgctggacgagggcgtggcggcggaccggatcgtgatcgccggcgattcgtcggggggcggactggcgctcgcgctgctgctgtcgctgcgcaacgcgggcgcgcccttgccggccggcgcggtcttgttctcgccgtggacggatctggcggcgaccggggcctcgctggaagcgaacgacgcgtccgacgtgatgctgagcgcggtggcggtgaggaatttctcgcgctactaccttggcgacgccgccaccgatcatcccatcgcctcgccgctctacggcgagtacgcgggcctgcccgatctgttcatccaggccagcgacaccgaagtgctgttggacgacgccgcgcgcgtggcccgcaaggcgagcgcggccggcgtcgcggtggacttcaaggtgtggcggcggctgccgcacgcatgggccaccttggcgcccatgctgccggaggcgagggcggcgatcaaagaggccggcagtttcgttcgcaaggtggcgccatgaaccgcgaatggaagccggcgccgggcggcgcgtgggtggacgccgcgccggcgggccggcatgcggcgctgcgcctgttctgcttcccgtacgccggcggcggagcggcggtgttccggggttgggaggagcggtttccggccgaggtggatgtccggcccatgcatccgccggggcgggggcggcggtttcacgatgcgctgcgctaccggctggatcaactggccgacgaggcgacggacgcgatcacgccgctgctggaccggccttacgccttgttcgggcacagcatgggggcgagcctggcgttcgaagtggctcaacgggcgcgggcgcgcggcctgccgtcgccgtcatgcctgatcgtttccgggcgcgccgcgccgcactttcccgcgagggatcggccgatccacgctttgccggacgagcaatttctggacgaggtgatgaggatgaacggcacgccggcggaagtgctggagcacccggagctggttcagatcattctgccggtcctgcatgccgatttcgaggcgatagagacctaccatcccgagccgcgtcctccgctgaactgccggatccttgctcttggcggcagagaagaggtccggggcgcggaggcggcggcttcatggcgcggctacaccaccggcggttttcgcagcgagatcctgcccggcgatcacttcttcctgaacgggagaccggaaagcctgttcgcgatactgaaggaggagcttggccgcgctgtg

SEQ ID NO: 107 - DNA, 465 bp, Chromobacterium haemolyticum
atggctgacctatctccgtccgatgacatccgcgccgccatggaagccttcttccatgcctacaaagctttcaccgataaaccggatgaaatgctcgccaaacgcggcctggctcgcgtgcaccaccgcatcctgttcttcgtcgcccgctaccccggtttgtcggtcaaggatctgctggccgcgctgggcgtgaccaagcaggccatcaatatgcctctgcgccaactgctggaaatggcgctggtgcaaagcgtggccgcacagcacgacaagcgggtcaagcagctgacgctgaccctagaaggacgcaagctggaggaagcccttcaccgcgagcaactgaaattgctgcaagcggcgtttgagcagaccggcaagccggccaccgccggctggatgcagatcaaccgcaccctggccgcgcaatcgcgccccgacgacgcgccgccgcgcggcaaaact

SEQ ID NO: 108 - DNA, 1167 bp, Chromobacterium haemolyticum
atgcagagtaccatgttttcagagcgcatcgaacggctcagcgggtcgctgatccgagaaatactggcggcggcgcaacagccgcagatgatctctttcgccggcggcttgccggccagccagtgtctgccgaccttggattttactggaatgcctgcggccatggcgcagtacggggcgagcgaaggggagccggaattgcgcgagctgatcgcggagcaggcgcgtcgcttgggcataagctgcgaggctgagcaagtgttggtgctgtccggttcgcagcaatgcatcgatttgtgcgccaagctgttcatcgatcccggcacgccggttgtgaccgaagggccgacttatctcgcggccttgcaggctttcaagttgttcggcgcccgcgttcacgcggtggggcaacgggacggcaggctggagccgcaggccttggccgcagcgttggaacaggcgcggccgcgctgctgttacctgattcccagtttccagaacccggcgggcagttgttacagcgttgaagaccggcaagcgctggcggccgccatcgacgccgctggcgtgcccttgatcgaagacgatccttaccgcgcgctcagttacgatggcgaagcgccggcgccgctggtcagtcatttgaagaacgcgccgtggatttactccggctccttttccaaaaccctggcgcccgggttgcgcgtcggtttcctgatcgcttcaccggagctgtacccctatttgatgcgcctgaagcaggcgaccgatttgcacaccaaccgtccggcgcagtggttcatcgcacgtcagttgcgggatcccggccatgagcaacgcttgctggatctgcgcgaggtgtatcgcgtaggacgcgacgcgatgcaggcgtcgctgcagcggcatttcgcagatttggccgattggcagctgccgcaaggcgggctgtttttctggctcaagctgaagcagcttagggatacccgcaagctgctgccgctggctttgcagcagaatgtcgccttcatgccgggcgaagccttctttcccgagccggaacagaatctcggctatgtgcgcctgaatttcagccacgcctcgccggagcgcatcgagataggcatcgccagactggcggctttgctgcgctctcaggccgtcgaggag

SEQ ID NO: 109 - protein, 1675 aa, Pseudomonas chlororaphis
MSIPCSEQPRVLPRLSLAEQLMSRADTFPDLLAFASLDQSKGISLTNADLCERAAAIAYRLAQRTSPGDRVLLAYDNPLEFIPAFFGCCFSGTIAVPVAPRTNGETVAAIVQDCGGTLALTAQGREGPPGIDWLQTDNNDRRSPFMRLAADNNPALLQYTSGSTRTPRGVAVTQASLRTTIEDLDRAALHDAQSVMVSWLPYFHDMGLVYGILTPLYCGFTAYLMPPESFIAQPLSWLRAMASVRGTHTAAPNFAYALCADRAADLAPGTDLSSMRFALNGAEPVRCDSVRRFVTAFAPFGMPASVVIPGYGLAEATLKVASGRCGEGTRSRCFEPAALAAGRVVPCHQGIELASCGTSSVGTSIVIVDPATLVPCKPDVVGEIWVAGQSVADGYWSRESETREIFQACLATGGGPWLRTGDLGFLQQDELFVVGRLKDLIIVGGRNIYCHDLEDSVSECHPDIRKGRVFAVAIEGEDGEAVLIGAEVRSSCKEGDTRDILSRIRTELKVRHDIGALRIVLLRRGSILRTSSGKTRRAATRDALFRGELQVVADSHRQSVEADDDILLEIARFVPGAVGERTSRLIDAGLDSLSAARLAAAIYSRYGVRLKFETLYTASADSLCRDIANAQSAAVAEPLASHAIDCAQPFELSEMQQAYWIGQQSGVPLGSVQPHIRVDFEVDHSQVSSLSLRLAALVAAHPALRMSVQEDGRAVIDPRGYAPVIAHRDLRGLGQQAISAGLSAAREELAQDNRHPLSVCFTRLTDAKTVLHLRLGLLAGDLRSLLLLVRELVDGPSLVSGFRRVGTATSCVPFECREAWLKKVESIAPAPDLPQAMAATDIDAPRFVMCRQELSEELTTALALNAQALGVTLSSICMAAFVDVLRLWSASPALTINVTCSTRSGQAEQAIGDFTSSTLLSLREPHDSFADFAQAIQQQIWRDLDEPWSTGVSMLRELSRRNGAPVLMPIVVTSLLSGDQADDLSVLDSIGPMVDVSNPTPQVSLHNILARRDGRLLMMWEYVEQLFPAGLIETMFASFVEVLTTIATRPSAVEYPVLAKIPASQQARHLKANSTSCDRSPRRLATPFITHATESPDAIAVVFGDLLTTYGDLRQDAEDIAARLQRKGVRRGDVIAAIVEPGPRAVAALIGIGIAGAVYLPIEPSWPLTRIEELLYESKAGYAVLTHSMNLSIPTLQLDQQPGRLRPEPVDGDSSDVAYVIFTSGSTGRPKGVVITHEAAANTIDDINERFSVGPRDRALCVSSLAFDLSVYDIFGLLAVGGAVVFPERSRDPDAIAQALTTAGVTIWNSVPAVLELLLDVAAPHSSSLRLVLLSGDWIAPALTARIRQVFTGAQPISLGGATEVSIWSVIHPIVPSDAVLLSIPYGTPLSNQQCFVRAPDGRERPDGVAGELLLGGRGLALAYCGNDAETNRRFFTDKDGNRLYRTGDLARWMSTGELELLGRMDNQVKVQGYRIELGEIEAVAMKAGGISRAVASVVRRSGATVIQLHVLASQEVPGEVVTSVRAALALHLPTYMQPHHVGVLDVLPLTANGKVDRSRLPAPPEPKPVRPVRGDVLLETMMMQAYVEVVGIGIDPQQRFFDAGATSLHIVRLRALLESRGIAVPSLADFFSLATIRSVATSSLATSTGANSNQNDIAYIRAYKQRVRARRGEL

SEQ ID NO: 110 - protein, 1561 aa, Pseudomonas chlororaphis
MDKDIPVDAVAIIGAGCRVPGATTLEQFWSVIAGGQVTIERFTADAARREGVPEAVLSQPGFIGAGGTIENIDMFDAALFGIAPSQAAFMDPQQRVFLECVHDALEHAGHGAARGPRIGIWAGSASLDYLTDHVLGQLDRSAPNRYLQQWVGVDKDYLAAQVAYRMDFGGPAITVQTACSTSLVAVVLAVQGLLSYQCDIAVAGGASIGLPQRQGYVHEDGSILAADGACRPFTTQSSGTVFGNGAGAVILRRLEDALDDGDSILAVIRGAAINNDGAAKVGFTAPGGRGQGDVIRTALALGEVDGASIEYVETHGTGTAIGDAVELSALTSALGDRQLGGPRCAIGSVKANVGHMNAAAGVCGLIKVALAVQHAQIPPTVGAAHAIDELRGGSPYYLPTDLTPWSTPGRRAGVSSFGIGGTNAHVILEASPRRLAQVRSTVPLLLVSAREDALRELCANYAAFLEADPDLSIEDVCFTAAIGRLTRERRVAFRSEHRGQLISSLKAFADGKQDENAFFNEEQERRPEVTFAFGDTDNLGAVIDGILVWQTRGVVPSIVCGTGAGLFAAAFAAGALSADDARNCNAQNVVAPSLLWISAFSGMAIDSVEAVHKELAQLAHSRGDGASAVAAAGATLVLEFGDNALGADVAGVASFAQESLNAIAGLWTGGIDLDLTKIYSGANRVSLPTYPFQRKRFWIDPAPRYADSGTSTFLGRRTEAPMLRSSFFDAQWSVATLPFLCDHMIYGKVIVSGAALAVMIAEGVREVSKAHEFALHDLRFPAALVIPQGMGRRVQLQLVRDDDGFDATVLTQEPFEIHATARVETITTVSVVPSQTVQGEETPTALLDSWLRDHSVVMGPSFSRLSDIVIGHNDAVCSMRTDAGDDEWLLHPGILDSALQLLAVAARPEGNKAFVPTRIARLTIRAHTASQLRCYAAADRGLATLFDDHGVLAEMVGLESREVSRNELLRIEPLRDGYSIEWRSQSLDRPFELPQTVVVLRDAGRVAEELAEILLAEGKRPLVADSPSDISFETTDFIIDCRGADARATGPDLSLYEGALDLLGTVARNDRPCCVAIVLPVNVPSGAPLQALARVAAMETPYLRTLAVRANDARTIRHGLDFFDRETEVMVDGEGVSAPRFHRFDLPRRTEASFSGDETWLITGGLGELGLRVASWLSALGVRSLVLTGRHPPDADAQETLAAFEHEGIDVQVIQADLANDADIEALLHKIDTTMPALRGICHLAGVVEDRLMGDVTPASLKATFAGKAQGAWLLHKRTLRYPLKHFILFSSAAAAFGAPGQATYAMANAYLDELAVYRRSQGMPALSIAWGPWQDIGMAARTAVTAKRRLSQLGIGQIEEECGRATFENILFADLPAHAVLLAVDWQRLVGQWPPQVPFSRFDDIVSDIPGSARTSSVNELLPLSADERRHRLFQLIAEDVSAVTGTDLATLDPERSLFEYDLDSLLITDLRLKLERRFGRPVAATVIFSNPTVAALADHMAQTVFGEAAIDALRSAADQAHLPVSASALPETSIPEHLSQEDVVEMLSAKLEELRGGSM

SEQ ID NO: 111 - protein, 1176 aa, Pseudomonas chlororaphis
MSTNNPTRLMHDALIEIERLQRKLGGLEQQLNEPVAVLGMGCRFSGADSPEELWQLLLAGTDGVRAVPADRWDSERYFDADPDSAGHIYCRTGSFLDDIASFDPGFFGISAREATMLDPQQRILLEVVWEAVERSGIPASALRGSATGVFVGVMHQDYAHRIRNAADVDLYSASGNAASVLAGRISHVLGLHGPSITLDTACSSSLVAVHLACAALRAGECDIAIVGGVNVVLSPISTAAECRAHMLSASGRCRPFDDSADGFVRGEGCGVVVLQRLSDATAAGRSIDALIAGSAVNHDGRSAGLTVPNEHAQRELIRAALRAANIDAQQVQYVEAHGTGTSLGDPIEAAALASVFANRAKGSPVLLGSIKSNLGHLEGAAGIAGLIKAILCVRHGVVPATLHVLQPNRGVDWRSVPLRLARQNEQMSGALRVAGVSSFGFSGTNAHAIVVAAPVSQAVRGEVRFPQLLTVSAKSAASLLMNAVRFAEHLSGISETELEDVCFSSRVARTHFSHRLAVVASSAQEMANELRRFALGEQTTVVSGLTRAMSPARDVAGEALPETLEAIAQGYVLGAPVDLTRLAPERCRIVSLPTYAFDRQKYWLDEQSGATQAPPLYRIAWKPIPLVASALRSGRRIIAGNDPQLCGEIAAALEAAGEQCTVVGAEVETILGAGNANLGVMLVVAGSLATAEPLEAITQYGALIIELAQALALNPSLGPVVVVTRGATFTGPAEEVNPVVAAINAAVRVARREQGALWGRSVDIDGSQQSLATLAAMLGTVEDGEEEVAIRAAVILVPRLRRTGTCEVMPDIAADGVYVITGGTGALGLASACWLASRGARHLLLISRRGEQEQDVRASCDQLRSDGVDVRVACADVADEVSLRSALALADRPVRGVIHCAGVIDDSSLVTMTSATFAGVLRAKVGGADLLDRLTVNQPVDLFLLFSSISVALGRHGQAAYAAANAYLDALSQQRCLYGRPALSVGWGLWAAGMGTTDPKVLERMRASGLQALTETEAFGALEKAFNVDAHLIIAAIDTQRIASQPNLPRLLEGMVGGHPPMLRPVFDFEQLRGHSADARRALIAEYLGGELQFILSSDVELSHDMSLIELGMDSLTGSELRNAIERSTGVYVPMQHFIDGSPLNTVVEVIVGQLERRLVTTQSVSPGTSTEKITL

SEQ ID NO: 112 - protein, 4361 aa, Pseudomonas chlororaphis
MQFSELMAIISTQPIRLQQEEGDLVVLGDDEGLDDALWDSLVKHKSRLLDLVARHDGDWLSPAYRITPDMLPLVKLDQPAIERIVASVPGGAANVQDIYPLAPLQEGMLYHHLSAQQGDPYVLHAQFAFASRQRLQAFAEALQWVIERHDILRTAMFWERLDEPVQVVWRQARLDCEELSLNTADGDVLEQLLARFDARHYRLDLRQAPLLRLVFAEDPHQQRVVGMLLFHHTVMDHTALDLVREEIQAHLLGQCAQVAPAVPFRDYLAQARLGADEQAHEAFFRQMLGDIDEPTLPFGLRDVQGDGRGIEELRISLDDGLSLRLRGQSRQLGVSAASLMHLALALVLGKASGRSAVVFGTVLLGRMDAGEGAERALGMFINTLPLRVDVDGHSVRAAVQATHQRLTALLGHEQASLALAQRCSAVSAPTPLFSAMLNYRHSAAGDAAAVIDIAEGIQVLGAEERTNYPLTVNVDDLGEGFRLTLMVAAEIGAARLGGYLQTALESLVAALEHNPEASLQNLNILPAAERQQLLFGLNPVRQFADSALIHQQVEAQAAAQPDATALIHEGRQLSYGELNRRANQLAHRLLALGVRPDDRVAICVERGLEMIVGLLGILKAGAGYVPIDPAYPQERIAYTLRDSEPLALLAQAGTRQLLGELAVPLLDLDDPQLNQQPSSNPQVPGLSSSNLAYVIYTSGSTGLPKGVMIEHRNVARLFSATQDGFAFNRQDVWALFHSFAFDFSVWEIWGALIHGGRLLVVPQLVSRSPDDCYALLCQASVSILNQTPSAFRQLIAAQERSPLKHSLRQVIFGGEALEPGILKPWYGRLENAGTQLVNMYGITETTVHVTYRALQAADAQRLGASPIGGPIPDLQLYVLDERREPVPVGVVGELYVGGAGVARGYLNREALTAERFIDDPFRADSGQRLYKTGDLARWNAQGELEYLGRNDDQVKIRGFRIELGEIEARLAACAGVREAVVIAREDEPGDQRLVAYLIGAEGVELDAAALRDQLLLSLADYMLPSAFVQLDALPLTTNGKLDRKALPAPDNTALARRGFEAPQGEVEQRIAAIWQELLKVERVGRHDNFFELGGHSLLAVKLIERMRQLELGADVRVLFGQPTLAALAAAVGGGREIQVPANRIGADCSRITPDLLPLADLDQAAIDQLVAGIPGGVGNVQDIYGLAPLQAGILYHHLASEEGDPYVLQVQCAFSGRPQVEAFVGALDSVIERHDILRSSVHWQGLAEPVQVVWRQAPLVVEQLEPEAGGDVLHQLQQRFDPRHYRLDLNRAALMRFAYARDEQNQRWLGILLLHHILLDHTALAGLVAEMSASLSGHTQPLGEAVQYRNYVAQARLGVSEEEHEAFFREMLGDIDEPTLAFGLGDVNRDGSGVEETRLPLDAALARRLREQARQLGVSAASLVHLAWAQVLGQVSGRDDVVFGTVLLGRMQGGEGADRALGMFINTLPLRVSLGAVGVRDAVRATHGRLSQLLGHEHASLSLAQRCSSVPASLPLFSSLLNYRHSAAEAVATVDGAAWDGIQILSSQERSNYPLVLNVDDRGEAFELVVQTLAEVGGQRVAGYMQTALQGLVEALEQEPARPLRELSILPAEERQRLLVTFNATQRAYPHTQTLHALFEAQARLHPQATAAVQGGQSLSYDALNRRANQLAHHLIGLGVKPGDSVAILLERSLDLLASQLAVSKCTAVYVPLDINAPAERQAFMLEDSAARVLLSDSRQVTSHRVARVDLDRLTLDGLPEHDLQLAQSSEALAYIMYTSGSTGTPKGVLVPHRAITRLVINNGYADFNRDDRVAFASNPAFDASTLEVWAPLLNGGCVVVVEQDVLLSREAFGQLLQAQQVSVLWLTAGLFHQYADGLMPAFSRLRYLIVGGDVLDPAVIGRVLQQGAPRHLLNGYGPTEATTFSTTFEITEVGEGGIPIGRPIGNSRAYVLDAQQRPLPIGAVGELYIGGAGVAKGYLNQPELTAQAFIADPFSDQPQALLYRTGDLASWRADGTLLYQGRNDQQVKLRGFRIELGEIETRLAACPGVQDAVVLAREDEPGDKRLVAYFTAAADESAPQLDSLRAQLQGQLPDYMVPSAYVRLDRLPLTANGKLDRKALPVPDQAALLSRGFEAPQGDVEIALARIWRELLKVEQVGRHDHFFELGGHSLLAVSLIERMRQIGLSADVRALFSQPSLAALAAAVGSGREIQVPANRIPAGCQHITPELLPLVELEQAEIERIVAQVPGGAANVQDIYPLAPLQEGILYHHLSAGQGDPYLLQSRMAFDSLERLQAFAGALQQVIERHDILRTAVLWEGLKQPVQVVWRKAELPLQQVPLDVAGGDVLEQLHACFDARHYRLDLTQAPLLRMVYAQDPAQQRVVAILLFHHLALDHTAMAVVGEEMRAFMFGEAERLGMPVPYRNYVAQARLGAAEQEHEAFFRDMLGDIDEPTLPFGLQDVQGDGRDIEEAELALDTALSLRLRTLARRLGVSAASLMHLAWAQVLGQVSSRRDVVFGTVLMGRMQGGEGADRALGMFINTLPLRVDRGLGVQAAVKATHARLTALLGHEHASLALAQRCSGVAAGAPLFSALLNYRHSAPQEMARSGQGIWQGVELLGGEERSNYPLTLSVDDLGEGFGLNVLTLSSIGAQRIGQYMQQALEQLAQALEQDPELPLQRLPILPQAEWQRLLSSFNASAANYPRGQTVHGLFETRAARTPDAFALLQGEQRLTYRQLNQHANQLAWHLLAQGVQPDDRVAICVRRGPQMLIGLLAILKAGAGYVPIDPAYPAERIAYLLRDSAPVAVLAQQQTRALLGDSLPVIDLAATDWQYRPVTNPGPALTAAHLAYVIYTSGSTGLPKGVMVEHQTLENLVHWHCAAFDLKPGSHTSSVAGFGFDAMAWEVWPALCGGATLHLPPAEVGNEHIDELLSWWRGQPLDVSFLPTPVAEYAFSQDLDHPTLRTLLIGGDRLRHFSRNQRFQVINNYGPTEATVVATSGRIEAGRPLHIGKPMANARIYLLDEQLQPVPVGVAGELYVGGAGVARGYLNRAQLTAERFLDDPFSANSVNGGPAARMYRTGDLARWLADGSIEYLGRNDDQVKVRGMRIELGEIEAALARHEALRECVVLVRDGRLVAWFSEHRPLDIEELRTYLQGRLPDYMLPAAYVRLDSLPLTANGKLDRKALPEPDQAALLSREYEAPQGEVEVTLAGIWAEVLKVERVGRHDHFFELGGHSLLAVSLIERMRQLGLSADVRILFSQPTLAALAAAVGSGREVEVPANLIPADCQHITPDLLPLVELQQAEIDRIVAQVPGGATNVQDIYPLAPLQEGILYHHIMAEQGDPYLLQSRMAFDSLERLQAFAGALRQVIERHDILRTAVLWEGLKQPVQVVWREAPLVLREVACDTATGEVLAQLLQRFDARRYRLELTQAPLIQLMYAADPERQRVVAVLLFHHLAMDHSALDVVRHELQALLLDQAQGLGPAVPFRNYVAQARLGTGEQAHEAFFREMLGDVDEPTLAFGLQDVQGDGHGIEERQLRLPASLDQGLRSQARRLGVSAASLFHLAWAQVLAAASGKRNVVFGTVLVGRMQGGAGADRALGVFINTLPLRVDIDEQDVRAGVRATHARLTALLGHEHASLALAQRCSGVAAGTPLFSAMLNYRHSLTPRQELQHAWQGIETLASDERTNYPLTLNVDDLGDGYHLTALVAAGVGAQRVCDFMQTVLQGLVDALEQSPQTALDRLPVITAEERRQLLVAFNATEAPYDLEQSIHGLFEAQVERTPEALAVKAGEQSLSYRALNERANQLAHYLREQGVGPDARVAICVERGLEMVVGLLAILKAGGGYVPLDPSYPLERIAYMLEDSAPVVVLAQGATRGLLGDVPVIDLDRPVWQDQPLSNPVIADLTPRHLVYVIYTSGSTGKPKGVMNEHRAVVNRLLWMQDQYGLSADDAVLQKTPFSFDVSVWEFFWPLMTGARLVMARPEGHKDPAYLCEVIQAERISTLHFVPSMLDVFLAHGDTARCTGLRRVLCSGEALPGSLVRRFKAQLPGSELHNLYGPTEAAVDVTAWNCAGPVEQVPDNTPIGKPIANTRMYLLDEQLQPVPLGVVGELYIGGVQVARGYLHRPELTAERFLKDPFSDKAQARMYRTGDVGRYLPDGTIEYLGRNDDQVKIRGLRIELGEIQARLTQFPDVKEVVVLAREDVPGDKRLVAYYTTEVSSERLETEALRSHLLEQLPEYMVPALFVHLPALPLSPNGKLDRKALPAPDLESLRVREYEAPIGDTEILLARIWAELLNVERVGRHDHFFELGGHSLLAVSLIGRLRQEGMEADVRALFEQPTLAGYAAITERMEIVL

SEQ ID NO: 113 - protein, 4361 aa, Pseudomonas chlororaphis; identical to SEQ ID NO: 112

SEQ ID NO: 114 - protein, 391 aa, Pseudomonas chlororaphis
MMNDRVAAFLAVEAALAAPEAALASGDFATVEQLMSDIRGANRARGLWLPQLSRVNGGSGLDLLELVEVGEVLGRSPLGHYAVNYQAPDAGNIDILLEYATSEQKRRWLDPLLQGKVRSCFAATEPDRAGSNPSALATKAVFKEGAWHLTGRKWFASGADRAAFAIVLAVTDETAPLHARTSTFIVPTDAPGYRHVRNIRVMGDEGCGWASHGEIELDDCRVETDALLGELGAGFVVLQARLATGRLHHCARWIGVCERAFAIMCRRASRRELAPGEFLSSRQTVQNWIAESRASIDAARLLVAQAASRLQKRHERAQVDISIAKFFVAGVTQNVLDHALQIQGALGVSGDTIVNVLWRHERAGRIYDGPDEVHKALVARHALAVFRGEPR

SEQ ID NO: 115 - protein, 322 aa, Pseudomonas chlororaphis
MSLRVAHRTMIALGNPGAAALATRIGAGRSSETYLVQANDRDLITYVLPSGSGREAHRRFAVLERIAEHYRLAPKPLAVMDVSDEGLSLLVMERLPGILPTTCVSLTPDTVRRLCVGFISALASLHAIEIAPVDRPPEYLRRSIGDWERRWCEEEAAGAHDDFNAVVRWLTDNLPDQVASAFVHNDFKLDNILVDPGDPARVVGVVDWELATIGHPLADLGIALAYWIERGDSSLLRLDAPGPSCALGAPTRQELVELYAAASGREVPNASYWYVYGLLRLAVITQQLVLRHKDGGPPVPRGQLIVRSLLVHALNTCGSGRL

SEQ ID NO: 116 - protein, 299 aa, Pseudomonas chlororaphis
MDYHVIIVGGSYAGLSAGLQLARARRRVLVIDAAERRNRFAETSHGFLGQDGRSPAHIADEAREQLLAYPTVEWLADTAIDAGQDPEGFWLSTRGGQRHRAQRLILATGVVDELPEVEGLAARWGKSVFHCPYCHGYELAGGPIGVLATSELSMHQALMLPDWGPTTLFINDAFAPDAEQLASLERRGVRVEREPVRRIAGDKAEVILADGRAIAVEGLFVVPRTRMASPLAGVLGCEFEEGPLGAFIKTDATRETSVPGVFACGDAAAAFSSVAIAVGDGAKTGAGTHRSLIFGLAPE

SEQ ID NO: 117 - protein, 276 aa, Pseudomonas chlororaphis
MRTHSDKGSRVAHPPKGWRIRENTEACQPLRGEWVEPQDPAQRDRLHRVVMYLHGGGYCFCSPKTHRRIAYALASGGEARTFSLAYRLAPEHPFPAAVDDALAAYRQLLAEGVCPARMVICGDSAGGGLALAMLLSLRDSDEPMPAGAVLFSPWTDLAATGASLATNNQSDVMLTGAAVARFSRHYLNDTPADHPIASPLYAQFSGLPPLFIQASDTEVLLDDAVRVAEKARLAQVTVNFKVWPRLPHAWPTMTPFLPEAKAAVKEAVEFIRSVTV

SEQ ID NO: 118 - protein, 254 aa, Pseudomonas chlororaphis
MTIGPLGSNHWVVPGTSPGNARVRLFCLPYAGGSAAIFRDWPARLASDIEVLPLHLPGRGQRMHEALLHDLGEITNQVAEAIAPLLEKPYVLFGHSMGACLAFEVARRLRTSGLPEPACLIVSGHGAPHLPASRSLLHGLPDDEFIDEVMRLNGTPPEILKHPEVVELILPILRADFEAVETYSMTPQPPLTCRIVALGGDNDPDMDNDAVASWGIHTTNSFYYQMLPGDHFFLHGSAEQMFALINKELRSVLL

SEQ ID NO: 119 - protein, 280 aa, Pseudomonas chlororaphis
MISVPLSMYSLAARSRVCWEPLTTSTWLASHGTPSARACAARASRSCGSPSLMPYWPMDNGIACQSVFGSIASAGRPPANDITSGRCAAARISRISELLRRETRSEKAMRVTSSEGGGKYVKLLDRNYADLRRYVNMLDLKNPTTQQAAMEAFFFGYQAFTAKADEMLERRGLSRVHQRIVFFIARYPGLSVKELLTALGVSKQALNIPLRQLMEMHLVNSVAPESDKRKRLLELTEDGARFEQSLRREQVKLLQRVFAEAGEAAVDGWLAVNKALGENR

SEQ ID NO: 120 - protein, 388 aa, Pseudomonas chlororaphis
MAFSERVSRLKSSLIREILAAAQRPEVMSFAGGLPAEAMLPKTDWQAMPLSMGQYGMSEGEPQLREALAAQARALGVPCEASQVLVVSGSQQTLDLAAKLYIDKGTEIMLEAPTYLAALQIFQLFGADCLTVPLQADGPDLAQLRARLEQHRPAFIYLIPTFQNPSAVRYSEAKRDAVAALLDEFGVTLIEDEPYRELTFDGGSAMPIVGRLRKASWIYTGTVSKTLLPGLRVGYLIASPDLFPHLLRLKQSADLHTNRVGQWQALQWIGTEQYQQHLGELRDFYRVRRDGFQAALQRHFGDLADWQVPQGGLFFWLTLKQPLDTRTLLKAALEQDVAFMPGEPFFSEPDRNPGHLRLNFSHIDPARLDEGLKRLATVVRQAQAAQAA

SEQ ID NO: 121 - protein, 1675 aa, Pseudomonas chlororaphis
MSIPCSEQPRVLPRLSLAEQLMSRADTFPDLLAFASLDQSKGISLTNADLCERAAAIAYRLAQRTSPGDRVLLAYDNPLEFIPAFFGCCFSGTIAVPVAPRTNGETVAAIVQDCGGTLALTAQGREGPPGIDWLQTDNNDRRSPFMRLAADNNPALLQYTSGSTRTPRGVAVTQASLRTTIEDLDRAALHDAQSVMVSWLPYFHDMGLVYGILTPLYCGFTAYLMPPESFIAQPLSWLRAMASVRGTHTAAPNFAYALCADRAADLAPGTDLSSMRFALNGAEPVRCDSVRRFVTAFAPFGMPASVVIPGYGLAEATLKVASGRCGEGTRSRCFEPAALAAGRVVPCHQGIELASCGTSSVGTSIVIVDPATLVPCKPDVVGEIWVAGQSVADGYWSRESETREIFQACLATGGGPWLRTGDLGFLQQDELFVVGRLKDLIIVGGRNIYCHDLEDSVSECHPDIRKGRVFAVAIEGEDGEAVLIGAEVRSSCKEGDTRDILSRIRTELKVRHDIGALRIVLLRRGSILRTSSGKTRRAATRDALFRGELQVVADSHRQSVEADDDILLEIARFVPGAVGERTSRLIDAGLDSLSAARLAAAIYSRYGVRLKFETLYTASADSLCRDIANAQSAAVAEPLASHAIDCAQPFELSEMQQAYWIGQQSGVPLGSVQPHIRVDFEVDHSQVSSLSLRLAALVTAHPALRMSVQEDGCAVIDPRGYAPVIAHRDLRGLGQQAISAGLSAAREELAQDNRHPLSVCFTRLTDAKTVLHLRLGLLAGDLRSLLLLVRELVDGPSLVSGFRRVGTATSCVPFECREAWLKKVESIAPAPDLPQAMAATDIDAPRFVMCRQELSEELTTALALNAQALGVTLSSICMAAFVDVLRLWSASPALTINVTCSTRSGQAEQAIGDFTSSTLLSLREPHDSFADFAQAIQQQIWRDLDEPWSTGVSMLRELSRRNGAPVLMPIVVTSLLSGDQADDLSVLDSIGPMVDVSNPTPQVSLHNILARRDGRLLMMWEYVEQLFPAGLIETMFASFVEVLTTIATRPSAVEYPVLAKIPASQQARHLKANSTSCDRSPRRLATPFITHATESPDAIAVVFGDLLTTYGDLRQDAEDIAARLQRKGVRRGDVIAAIVEPGPRAVAALIGIGIAGAVYLPIEPSWPLTRIEELLYESKAGYAVLTHSMNLSIPTLQLDQQPGRLRPEPVDGDSSDVAYVIFTSGSTGRPKGVVITHEAAANTIDDINERFSVGPRDRALCVSSLAFDLSVYDIFGLLAVGGAVVFPERSRDPDAIAQALTTAGVTIWNSVPAVLELLLDVAAPHSSSLRLVLLSGDWIAPALTARIRQVFTGAQPISLGGATEVSIWSVIHPIVPSDAVLLSIPYGTPLSNQQCFVRAPDGRERPDGVAGELLLGGRGLALAYCGNDAETNRRFFTDKDGNRLYRTGDLARWMSTGELELLGRMDNQVKVQGYRIELGEIEAVAMKAGGISRAVASVVRRSGATVIQLHVLASQEVPGEVVTSVRAALALHLPTYMQPHHVGVLDVLPLTANGKVDRSRLPAPPEPKPVRPVRGDVLLETMMMQAYVEVVGIGIDPQQRFFDAGATSLHIVRLRALLESRGIAVPSLADFFSLATIRSVVTSSLATSTGANSNQNDIAYIRAYKQRVRARRGEL

SEQ ID NO: 122 - protein, 1561 aa, Pseudomonas chlororaphis
MDKDIPVDAVAIIGAGCRVPGATTLEQFWSVIAGGQVTIERFTADAARREGVPEAVLSQPGFIGAGGTIENIDMFDAALFGIAPSQAAFMDPQQRVFLECVHDALEHAGHGAARGPRIGIWAGSASLDYLTDHVLGQLDRSAPNRYLQQWVGVDKDYLAAQVAYRMDFGGPAITVQTACSTSLVAVVLAVQGLLSYQCDIAVAGGASIGLPQRQGYVHEDGSILAADGACRPFTTQSSGTVFGNGAGAVILRRLEDALDDGDSILAVIRGAAINNDGAAKVGFTAPGGRGQGDVIRTALALGEVDGASIEYVETHGTGTAIGDAVELSALTSALGDRQLGGPRCAIGSVKANVGHMNAAAGVCGLIKVALAVQHAQIPPTVGAAHAIDELRGGSPYYLPTDLTPWSTPGRRAGVSSFGIGGTNAHVILEASPRRLAQVRSTVPLLLVSAREDALRELCANYAAFLEADPDLSIEDVCFTAAIGRLTRERRVAFRSEQRGQLISSLKAFADGKQDENAFFNEEQERRPEVTFAFGDTDNLGAVIDGVLVWQTRGVVPSIVCGTGAGLFAAAFAAGALSADDARNCNAQNVVAPSLLWISAFSGMAIDSVEAVRKELAQLAHSRGDGASAVAAAGATLVLEFGDNALGADVAGVASFAQESLNAIAGLWTGGIDLDLTKIYSGANRVSLPTYPFQRKRFWIDPAPRYADSGTSTFLGRRTEAPMLRSSFFDAQWSVATLPFLCDHMIYGKVIVSGAALAVMIAEGVREVSKAHEFALYDLRFPAALVIPQGMGRRVQLQLVRDDDGFDATVLTQEPFEIHATARVETTTTVSVVPSQTVQGEETPTVLLDSWLRDHSVVMGSSFSRLSDIVIGHNDAVCSMRTDAGDDGWLLHPGILDSALQLLAVAARPEGNKAFVPTRIARLTIRAHAASQLRCYAAADRGLATLFDDHGVLAEMVGLESREVSRNELLRIEPLRDGYSIEWRSQSLDRPFELPQTVVVLRDAGRVAEELAEILLAEGKRPLVVDSPSDISFETTDFIIDCRGADARATGPDLSLYKGALDLLGRVARNDRPCCVAIVLPVNVPSGAPLQALARVAAMETPYLRTLAVRANDARTIRHGLDFFDRETEVMVDGEGVSAPRFHRFDLPRRTEASFSGDETWLITGGLGELGLRVASWLSALGVRSLVLTGRHPPDADAQETLAAFEHEGIDVQVIQADLANDADIEALLHKIDTTMPALRGICHLAGVVEDRLMGDVTPASLKATFAGKAQGAWLLHERTLRYPLKHFILFSSAAAAFGAPGQATYAMANAYLDELAVYRRSQGMPALSIAWGPWQDIGMAARTAVTAKRRLSQLGIGQIEEECGRATFENILFADLPAHAVLLAVDWQRLVGQWPPQVPFSRFDDIVSDIPGSARTSSVNELLPLSADERRHRLFQLIAEDVSAVTGTDLATLDPERSLFEYDLDSLLITDLRLKLERRFGRPVAATVIFSNPTVAALADHMAQTVFGEAAIDALRSAADQAHLPVSASALPETSIPEHLSQEDVVEMLSAKLEELRGGSM

SEQ ID NO: 123 - protein, 1176 aa, Pseudomonas chlororaphis
MSTNNPTRLMHDALIEIERLQRKLGGLEQQLNEPVAVLGMGCRFSGADSPEELWQLLLAGTDGVRAVPADRWDSERYFDADPDSAGHIYCRTGSFLDDIASFDPGFFGISAREATMLDPQQRILLEVVWEAVERSGIPASALKGSATGVFVGVMHQDYAHRIRNAADVDLYSASGNAASVLAGRISHVLGLHGPSITLDTACSSSLVAVHLACAALRAGECDIAIVGGVNVVLSPVSTAAECRAHMLSASGRCRPFDDSADGFVRGEGCGVVVLQRLSDATAAGRSIDALIAGSAVNHDGRSAGLTVPNEHAQRELIRAALRAANIDAQQVQYVEAHGTGTSLGDPIEAAALASVFANRAKGSPVLLGSIKSNLGHLEGAAGIAGLIKAILCVRHGVVPATLHVLQPNRGVDWRSVPLRLARQNEQMSGALRVAGVSSFGFSGTNAHALVVAAPVSQAVRGEVRFPQLLTVSAKSAASLLMNAVRFAEHLSGISETELEDVCFSSRVARTHFSHRLAVVASSAQEMANELRRFALGEQTTVVSGLTRAMSPARDVAGEALPETLEAIAQGYVLGAPVDLTRLAPERCRIVSLPTYAFDRQKYWLDEQSGATQAPPLYRIAWKPIPLVASALRSGRRIIAGNDPQLCGEIAAALEAAGEQCTVVGAEVETILGAGNANLGVMLVVAGSLATTEPLEAITQYGALIIELAQALALNPSLGPVVVVTRGATFTGPAEEVDPVVAAINAAVRVARREQGALWGRSVDIDGSQQSLATLAAMLGTVEDGEEEVAIRAAVILVPRLRRTGTCEVMPDIAADGVYVITGGTGALGLASACWLASRGARHLLLISRRGEQEQDVRASCDQLRSDGVDVRVACADVADEVSLRSALALADRPVRGVIHCAGVIDDSSLVTMTSATFAGVLRAKVGGADLLDRLTVNQPVDLFLLFSSISVALGRHGQAAYAAANAYLDALSQQRCLHGRPALSVGWGLWAAGMGTTDPKVLERMRASGLQALTETEAFGALEKAFNVDAHLIIAAIDTQRIASQPNLPRLLEGMVGGHPPMRRPVFDFEQLRGHSADARRALIAEYLGGELQFILSSDVELSHDMSLIELGMDSLTGSELRNAIERSTGVYVPMQHFIDGSPLNTVVEVIVGQLERRLVTTQSVSPGTSTEKITL

SEQ ID NO: 124 - protein, 4370 aa, Pseudomonas chlororaphis
MQFSELMAIISTQPIRLQQEEGDLVVLGDDEGLDDALWDSLVKHKSRLLDLVARHDGDWLSPAYRITPDMLPLVKLDQPAIERIVASVPGGAANVQDIYPLAPLQEGMLYHHLSARQGDPYVLHAQFAFASRERLNAFAEALQWVIERHDILRTAMFWERLDEPVQVVWRQARLDCEELSLKTADGDVLEQLRARFDARHYRLDLRQAPLLRLVFAEDPRQQRVVGMLLFHHTVMDHTALDLVREEIQAHLLGQCAQVAPAVPFRDYLAQARLGADEQAHEAFFRQMLGDIDEPTLPFGLRDVQGDGRGIEELRIGLDDGLSLRLRGQSRQLGVSAASLMHLALALVLGKASGRRAVVFGTVLLGRMDAGEGAERALGMFINTLPLRVDVDGQSVRAAVQATHQRLTALLGHEQASLALAQRCSAVSAPTPLFSAMLNYRHSAAGDAAAVIDIAEGIQVLGAEERTNYPLTVNVDDLGEGFRLTLMVAAEIGAARLGGYLQTALESLVAALEHSPDAPLQNLNILPAAERQQLLFGLNPVRQFADSALIHQQVEAQAAAQPDATALIHEGRQLSYGELNRRANQLAHRLLALGVRPDDRVAICVERGLEMIVGLLGILKAGAGYVPIDPAYPQERIAYTLRDSEPLALLAQAGTRQLLGELAVPLLDLDDLELNRQPSDNPQVPGLSSANLAYVIYTSGSTGLPKGVMIEHRNVARLFSATQEGFAFNRQDVWALFHSFAFDFSVWEIWGALIHGGRLLVVPQLVSRSPDDCYALLCEASVSILNQTPSAFRQLIAAQERSPLKHSLRQVIFGGEALDPGILKPWYGRVENAGTQLVNMYGITETTVHVTYRALQAADAQRLGASPIGGAIPDLQLYVLDERREPAPVGVVGELYVGGAGVARGYLNREALTAERFIDDPFRADSGQRLYKTGDLARWNGQGELEYLGRNDDQVKIRGFRIELGEIEARLAACAGVREAVVIAREDEPGDQRLVAYLVGAEGVELDAAALRDQLLLSLAEYMLPSAFVQLDALPLTTNGKLDRKALPAPDSTALARRGFEAPQGEVEQRIAAIWQELLKVERVGRHDNFFELGGHSLLAVKLIERMRQLELGADVRVLFGQPTLAALAAAVGGGREIQVPANRIGADCSRITPDLLPLADLDQAAIDQLVAGIPGGVGNVQDIYGLAPLQAGILYHHLASEEGDPYVLQVQCAFSGRPQVEAFVGALDSVIERHDILRSSVHWQGLAEPVQVVWRQAPLVVEQLEPEAGGDVLQQLQQRFDPRHYRLDLNRAALMRFAYARDAHNQRWLGILLLHHILLDHTALATLVAEMSASLSGLARSLDAAGHAQPLGEAVQYRNYVAQARLGVSEEEHEDFFREMLGDIDEPTLAFGLGDVNRDGSGVEETRLPLDAALARRLREQARQLGVSAASLVHLAWAQVLGQVSGRDDVVFGTVLLGRMQGGEGADRALGMFINTLPLRVSLGAVGVRDAVRATHGRLSQLLGHEHASLSLAQRCSGVPASLPLFSSLLNYRHSAAEEVAAVDGAAWDGIQILSSQERSNYPLVLNVDDRGEAFELVVQTLAEVGGQRVAGYMQTALQGLVEALEQAPARPLRELSILPAEERQRLLVSFNATQRDYPREKTLHALFEAQAQQHPQATAAVQGGQSLSYDALNRRANQLAHHLIGLGVKPGDSVAILLERSLDLLASQLAVSKCTAVYVPLDIHAPAERQAFMLEDSAARVLLSDSRQATSHSVARVDLDRLTLDGVPAHNPELAQSSEALAYIMYTSGSTGTPKGVLVPHRAITRLVINNGYADFNRDDRVAFAANPAFDASTLEVWAPLLNGGCVVVVEQDVLLSREAFGQLLQAQQVSVLWLTAGLFHQYADGLMPAFSRLRYLIVGGDVLDSAVIGRVLQQGAPRHLLNGYGPTEATTFSTTFEITEVGEGGIPIGRPIGNSRAYVLDARQRPLPIGAVGELYIGGAGVAKGYLNQPELTAQAFIADPFSDQPQALLYRTGDLASWRADGTLLYQGRNDQQVKLRGFRIELGEIETRLAACPGVQDAVLLAREDEPGDKRLVAYFTVVADESAPPLDSLRAQLQGQLPDYMVPSAYVRLDRLPLTANGKLDRKALPVPDQAALLSRGFEAPQGEVEIALARIWSELLKVEQVGRHDHFFELGGHSLLAVSLIERMRQIGLSADVRALFSQPSLAALAAAVGSGREIQVPANRIGAGCQRITPELLPLVELEQADIDRIVAQVPGGAANVQDIYPLAPLQEGILYHHLSAEQGDPYLLQSRMAFDSLERLQAFAGALQQVIERHDILRTAVLWEGLKQPVQVVWRKAELVLQQVPLDAAGGEVLEQLHACFDARHYRLDLTQAPLLRMVYAEDLAQQRVVAILLFHHLALDHTAMAVVGEEMRAFMFGEGDRLGMPVPYRNYVAQACLGAAEQEHEAFFRDMLGDIDEPTLPFGLQDVQGDGRDIEEAELALDTALSLRLRTLARRLGVSAASLMHLAWAQVLGQVSNRRDVVFGTVLMGRMQGGEGADRALGMFINTLPLRVDRGLGVQAAVKATHARLTALLGHEHASLALAQRCSGVAAGAPLFSALLNYRHSVPQEMARSGQGIWQGVELLGGEERSNYPLTLSVDDLGEGFGLNVLTLSSIGAQRIGQYMQQALEQLAQALEQDPELALQRLPILPQAEWQRLLSSFNASAANYPRGQTVHGLFETRAARTPDAFALLQGEQRLTYRQLNQHANQLAWHLLAQGVQPDDRVAICVRRGPQMLIGLLAILKAGAGYVPIDPAYPAERIAYLLRDSAPVAVLAQQQTRALLGDSLPVIDLAATDWQYRPVTNPGPALTAAHLAYVIYTSGSTGLPKGVMVEHQTLENLVHWHCAAFDLKPGSHTSSVAGFGFDAMAWEVWPALCGGATLHLPPAEVGNEHIDELLHWWREQPLDVSFLPTPVAEYAFSQDLDHPTLRTLLIGGDRLRHFSRNQRFQVINNYGPTEATVVATSGRIEAGQPLHIGKPMANARIYLLDEQLQPVPVGVAGELYVGGAGVARGYLNRAQLTAERFLDDPFSADSVNGGPQARMYRTGDLARWLADGSIEYLGRNDDQVKVRGMRIELGEIEAALARNEALRECVVLVRDGRLVAWFSEHRPLDIEELRTYLQGRLPEYMLPAAYVRLDSLPLTANGKLDRKALPEPDQAALLSREYEAPQGEVEVTLAGIWAEVLKVERVGRHDHFFELGGHSLLAVSLIERMRQLGLSADVRILFSQPTLAALAAAVGSGREVEVPANLIPADCQHITPDLLPLVELQQAEIDRIVAQVPGGAANVQDIYPLAPLQEGILYHHIMAEQGDPYLLQSRMAFDSLERLQAFAGALRQVIERHDILRTAVLWEGLKQPVQVVWREAPLVLREVACDTAAGEVLAQLLQRFDARRYRLELTQAPLIQLMYAADPERQRVVAVLLFHHLAMDHSALEVVRHELQAFLLDQAQGLGPAVPFRNYVAQARLGTGEQEHEAFFREMLGDIDEPTLAFGLQDVQGDGHGIEERRLRLPASLDQGLRSQARRLGVSAASLFHLAWAQVLAAASGKRNVVFGTVLVGRMQGGAGADRALGVFINTLPLRVDIDEQDVRAGVRATHARLTALLGHEHASLALAQRCSGVAAGAPLFSAMLNYRHSLTPRQELQHAWQGIETLASDERTNYPLTLNVDDLGDGYHLTALVAAGVGAQRVCDFMQTVLQGLVDALEQSPQTALNRLPVITAEERRQLLVAFNATELPYDLEQSIHGLFEAQVERTPEALAVKAGEQSLSYRALNERANQLAHYLREQGVGPDARVAICVERGLEMVVGLLAILKAGGGYVPLDPSYPLERIAYMLEDSAPVVVLAQGATRGLLGEVPVIDLDQPVWLDQPLSNPFIAELTPRHLVYVIYTSGSTGKPKGVINEHRAVVNRLLWMQDQYRLSAEDAVLQKTPFSFDVSVWEFFWPLMTGAKLVMARPEGHKDPAYLCEVIQAERITTLHFVPSMLDVFLAHGDTACCTGLLRVLCSGEALPGSLVRRFKAQLPGSELHNLYGPTEAAVDVTAWSCAGPVEQVPDNTPIGKPIANTRLYLLDEQLQPVPLGVVGELYIGGVQVARGYLHRPELTAECFLKDPFSSTAQARMYRTGDLGRYLADGTIEYLGRNDDQVKIRGLRIELGEIQARLTQFLDVKEAVVLAREDVPGDKRLVAYYTTELSSERLETEALRSHLLEQLPEYMVPVLFVLLPALPLSPNGKLDRKALPAPDLESLRVREYEAPIGDTEILLAQIWAELLNVERVGRHDHFFELGGHSLLAVSLIGRLRQEGMEADVRALFEQPTLAGYAAITERMEIVL

SEQ ID NO: 125 - protein, 4370 aa, Pseudomonas chlororaphis; identical to SEQ ID NO: 124

SEQ ID NO: 126 - protein, 391 aa, Pseudomonas chlororaphis
MMNDRVAAFLAVEAALAAPEAALASGDFATVEQLMSDIRGANRARGLWLPQLSRVNGGSGLDLLELVEVGEVLGRSPLGHYAVNYQAPDAGNIDILLEYATSEQKRRWLDPLLQGKVRSCFAATEPDRAGSNPSALATKAVFKEGAWHLTGRKWFASGADRAAFAIVLAVTDETAPLHARTSTFIVPTDAPGYRHVRNIRVMGDEGCGWASHGEIELDDCRVETDALLGELGAGFVVLQARLATGRLHHCARWIGVCERAFAIMCRRASRRELAPGEFLSSRQTVQNWIAESRASIDAARLLVAQAASRLQKRHERAQVDISIAKFFVAGVTQNVLDHALQIQGALGVSGDTIVNVLWRHERAGRIYDGPDEVHKALVARHALAAFRGEPR

SEQ ID NO: 127 - protein, 322 aa, Pseudomonas chlororaphis
MSLQVAHRTMIALGNPGAAALATRIGAGRSSETYLVQANDRDLITYVLPSGSGREAHRRFAVLERIAEHYRLAPKPLAVMDVSDEGLSLLVMERLPGILPTTCVSLTPDTVRRLCIGFISALASLHAIEIAPVDRPPEYLRRSIGDWERRWCEEEAAGAHDDFNAVVRWLTDNLPDQVASAFVHNDFKLDNILVDPGDPARVVGVVDWELATIGHPLADLGIALAYWIERGDSSLLRLDAPGPSCALGAPTRQELVELYAAASGREVPNASYWYVYGLLRLAVITQQLVLRHKDGGPPVPRGQLIVRSLLVHALNTCGSGRL

SEQ ID NO: 128 - protein, 299 aa, Pseudomonas chlororaphis
MDYHVIIVGGSYAGLSAGLQLARARRRVLVIDAAERRNRFADTSHGFLGQDGRSPADIADEAREQLLAYPTVEWLADTAIDAGQDAEGFWLSTRGGQRHRAQRLILATGVVDELPEVEGLAARWGKSVFHCPYCHGYELAGGPIGVLATSELSMHQALMLPDWGPTTLFINDAFVPDAEQLASLERRGVRVEREPVRRIAGDKAEVILADGRAIAVEGLFVVPRTRMASPLAGVLGCEFEEGPLGAFIKTDATRETSVPGVFACGDAAAAFSSVAIAVGDGAKTGAGTHRSLIFGLAPV

SEQ ID NO: 129 - protein, 276 aa, Pseudomonas chlororaphis
MRTHSDKGARVAHPPKGWRIRENTEACQPLRGEWVEPQDPAQRDRLHRVVMYLHGGGYCFCSPKTHRRIAYALASGGEARTFSLAYRLAPEHPFPAAVDDALAAYRQLLAEGVCPARMVICGDSAGGGLALAMLLSLRDSDEPMPAGAVLFSPWTDLAATGASLATNNQSDVMLTGAAVARFSRHYLNDTPADHPIASPLYAQFSGLPPLFIQASDTEVLLDDAVRVAEKARLAQVTVNFKVWPRLPHAWPTMTPFLPEAKAAVKEAVEFIRSVTV

SEQ ID NO: 130 - protein, 254 aa, Pseudomonas chlororaphis; identical to SEQ ID NO: 118

SEQ ID NO: 131 - protein, 280 aa, Pseudomonas chlororaphis
MISVPLSMYSLAARSRVCWEPLTTSTWLASHGTPSARACAARASRSCGSPSLMPYCPMDTGIACQSVFGSIASAGSPPANDITSGRCAAARISRISELLRRETRSEKAMRVTSSEGGGKYVKLLDRNYADFRRYVNMLDLKNQTTQQAAMEAFFFGYQAFTAKADEMLERRGLSRVHQRIVFFIARYPGLSVKELLTALGVSKQALNIPLRQLMEMHLVNSVAPESDKRKRLLELTEDGARFEQSLRREQVKLLQRVFAEAGEAAVDGWLAVNKALGENR

SEQ ID NO: 132 - protein, 388 aa, Pseudomonas chlororaphis
MAFSERVSRLKSSLIREILAAAQRPEVMSFAGGLPAEAMLPKTDWQAMPVSMGQYGMSEGEPQLREALAAQARALGVPCEASQVLVVSGSQQTLDLAAKLYIDKGTEIMLEAPTYLAALQIFQLFGADCLTVPLQADGPDLAQLRARLEQHRPAFIYLIPTFQNPSAVRYSEAKRDAVAALLDEFGVTLIEDEPYRELTFDGGSAMPIVGRLRKASWIYTGTVSKTLLPGLRIGYLIASPDLFPHLLRLKQSADLHTNRVGQWQALQWIGTEQYQQHLGELRDFYRVRRDGFQAALQRHFGDLADWQVPQGGLFFWLSLKQPLDTRTLLKAALEQDVAFMPGEPFFSEPDRNPGHLRLNFSHIDPARLDEGLKRLATVVRQAQAAQAA

SEQ ID NO: 133 - protein, 3225 aa, Burkholderia rinojensis
MTSFPTALHHRIHALARLAPDAPALASFTPGTVRLTRGELDDRAARLAAQLTAAGVTTEVRVGVCVARSCDLFVALLAVLKAGGVFVALDPRHPGARLDWVARDAGLAHGIVDASADAAMRARFARCFEVASVAEPDPAAPRTPGDAPVHPRAAAYMIYTSGSTGTPKAVVVEHGPLAAHGDALAASLPIGADDRVLHFASVNFDVAIEAWLVPLAVGGSVVISDPPPFAPQTAHAFMVREGVTNTTLPPAYLREFAAVCARDGVPPSLRVLLFGGEAMSQDSFDEIRRVFPAQRLVNGYGPTEAVISPMLWPVDPGATPALDPSQGYASLPIGWPIGRRVARIDGGAPQGADGELLLGGVCLARGYHGRPGLTAERFLPDPGGEPGERIYRTGDLARERADGSFDYLGRIDDQVQVRGVRVEPGEIAACLLAHPAVSDAGVLAETAGGRTQLTACVVLTEPLADAALKAHLGAHLPAAWLPHRFARFTRLPYTLNGKLDRAALRDSVAALPAVADDDHVAPVGATETRLAALWQRLLDEAAPLGRTDRFFARGGDSLGAMQLQAAIRAEWGVALRLEALFDDATLAELAAAIEQGEPDAAAPARALKIEAASADLSAPYRDRPASFAQQRFWVLARTQDAGDAYHVAVQWDIDGLLDPAVLQRALDHLLARHEAWRTTLVEDDDGVVWQRIHRRLPVTLATVDLRGLDDAVRAARLADLTRQHAGAAFDLSGGPLVRATLVTLTGGAQHFLLTTHHAVSDGWSSRCAFDELTRAYAAFAEGREPASPALPIQYADYAQAQRAMLAGGEGARQLDYWREALAQAPAPLALPLDRARGAAADHRGGRVALRLSAALSDALRDTARQLRASPFTLLLAAFDAWLFRLTGERDLVVAAPVADRAQAETRPLVGLFLNTLALRARVSPAQRFAALVDAVRRDAVAAFAHQDVPFDQVLDAVQPPARRGEAWLKVKFAQQFDLALSASLPGATARMAAGLDLGARFDYALDFTDDPQGIELVAAFALDGIDADTARAWLDSYAALLADAVRDPRQPIAALACASAATRAPQRGRALATTEHVLARFARAAAEAPQRAAVVDADASLSFAALDAWSDRLAHALRRRGAGPEQAVALRFERTTRFVAAWLGVLKSGAYAVPLDPAAPPERLAAALDACGARWLLVEGAGLDAAAAAALGDAATPLDVDALGGEPAPAEARLPAPLPGQAAYLIFTSGSTGTPKGVVIDHRALADYVDGLLDELAFAPDASMAMVSTVAADLGHTTLFGALCSGRTLHLLPASCAFDPDRFAHEMRSRDVGVLKIVPSHLHALLDAQAAADVLPAHALVTGGEALPWSLVARLAALKPACRVINHYGPTEATVGALVCDLSAPAQAVLREAALAAPGALGVPLGRPLPNADACVLDASGAPVPPGGIGELYLGGPGLARGYLRRAGATAERFVPDPFTPGARLYRTGDRVRLRADGRIAFLGRLDDQVKIRGYRVEPGEVSAALRALDGVAQAETLAVEHEGRLRLASFVTPAAGARLDDAALRCALAARLPDYMVPAVLQVCASLPVTANGKIDRAALRVLAAAPAPVADRPADAPQGPVETVLAAVWQEVLKTGRIGREDDFFALGGDSILVLQVIARARKRGVKFTPKQLFDGPTVAKLARVAVATDAAAPAAATRAAPAAAQADAPMLLPAQRRFFALDIPRRGHWNQSIELTPAAPFDFDAFTRAFDTVLTHHAVFRQRFTPTGPQGEWQPSEAPRAFDTLPLAAGVARDETDALAQFDALQAGLDLERGPLACAFAAALPDGATRLYLAIHHLIVDGVTWRVLLDDLDAAYRAAAERRAVRLASTGASASQWAARLARAARDPHGPFAAELPGWAALAAPHEDLPLDHPDARATNADAAVVIQALDADLTRRALTEANGAYRTQMVELLIAALAQALGRQTGQAACRIELEGHGREALFDELDASRTPGWLTSHYPVAFAVADTPLATLAGVKDSLRDVPNKGLGFGVLRHYGDDAARTALAAVPRPRVTFNYLGQFDAPRDAALVPRFGGAGLERDPGGPIGNALAIHAYIDAHDGRTLRVHWVYGATQFERATIDALAARFSAALTELTDACAERLASRGAGATPGDYPLARAAGLTQAALERLPFDLRTIDDIYPLAPMQQGILFHALFAPEQSTYVNQLVATLDAPDIARLRAAFEAAPPRHDILRTGFTADEAAPMQVVHRQATLPVEELDWRNLAERDAALDAWLAADRARGFDLAAPPLMRVALIRFGDAEWRLVWTRHHLLLDGWSTARCFADVLRDYLEPPRPNPFAAPARVRYRDFIAWLASRDAASERAFWLDRLARLDEPTLIAEREPQPGETGANRTWRATLDAATTARVGDAARQLKITVNTLVQGAWALALQRVTNRAAVAFGATVAGRPDALAEIDTVLGLFINTLPVIAAPLPQRSARGWLADLQRDNAAALDHAHTPLYEIQQWAGQGGRALFDTLVVFENYPVDEAWQGREPRALQKRDLRNIEATDFALTLVIEAGQTLTIDYGYDTARLGEARVAALHDAFVACLGGLVAAPDAPLGALACASDATLARAAQANATARDWPAAQQAPLHRQFEAAAQATPDAIALEMTEPSGAARRLSYRELDQQAERAAAALRVAGVLPDTAVALCVERSFDMVIALLGVLKAGAAYLPVDPDYPADRIDYLLRDARPAVVLTQAHLRERVATAVAGATPVVTVDALLQGAPEPGARTAVAADQLAYLIYTSGSTGKPKGAGNTHAALANRIAWMQDAYRLTRDDVVLHKTPFGFDVSVWEFVWPLAIGATLAIAAPGDHRDPARLVETIAAHRVTTLHFVPSMLAAFVAHLDDFGVAARCASITRIVASGEALAPALVARVQALLPHARLFNLYGPTEAAIDVSHWTCTADDGRAAAVPIGHPIANLQLHVLDVAGHPAPEGGIGELHLGGAGLARGYLGRAALTAERFVPDPSGGGARLYRTGDLVRRRADGALDYLGRLDAQVKLRGQRLEPGEIEALLRAAPGVRDAVVIVHDDQLVGYVAHGANPAPDAAALLDALRAQLPAYMVPSQLIALEALPVTPNGKCDRRALPTPERAARAVTPPRTETERTLAGIWQRALKLDAVGCDDDFFTLGGHSLLATQVNAQANLHWALTLPLRQLFEERTLARCAAVIDHALAARGGLSGQDAADAIDALLGELEIQ

SEQ ID NO: 134 - protein, 1564 aa, Burkholderia rinojensis
MTYETPVDAVAIIGASCRLPGAATLEQFWSMIADGRVGIERFGADAARREGVPETVLAQPGFVGAGGPLDGVDQFDAAYFGIPPSQAAAMDPQQRIFLECVHEALERAGHGAVRGARVGIWAGSASVDYLVDHVRDRLDRASPNRYLQQWVGVDKDYLATQVAYRLDFGGPAITLQTACSTSLVAVVQALQALLSFQCDFAVAGGVSVALPQRQGHVYEEGSILSADGACRPFTTDSSGTVFGNGAGVVVLRRLEDALADGDPIMAVIRGGAVNNDGAAKVGFTAPGGRGQNDVIRQALALSEVDGASIGYVETHGTGTAIGDEVELAALRAALGERADADARCALGTLKANVGHLNAAAGACGLIKAALAVEHGQIPGALGAAQAIDALRGESAFYLPAATTPWAAPVRRAGVSSFGIGGTNAHVIIEAAPPRAPRTPHVAPLLLLSARGDAALSALCADYAAFLERNPELRIEDACLTAALGRRHWEQRAAFRAESRAELIGALRAFAAGEREAGVIAAALPARVPEVSFAFGGVRDLDAALAGVQAWQASGVTPASVCATGDGVFAAAFAAGALSLDDARQRRVARAVAPSLLWIGAASGLPLDSAEAVRDELANANATADAAATAALEAAGAEYVLDFGEVALGAQAAGMASLDPASPDTLARLWTAGVTLDLAQHYRDGNRVVLPTYPFQRERHWIDRAPRFATGGASPFLGRRTDAPALNAIFFDAEWSVATLPFLQDHVIYDKVVVSGAALAVMIADGVRVLTESDACVLSDLRFPAALVIPPGAARHVQLQLVRDGEGFEATVLTPDSADIHATARVDAGEAPGVAPAQPVQGEAISAALLDGWLRARSVVMGPTFRRLSEMVVGDGEASCAMRADADDAGWQLHPGILDSVLQLVAAAARPDGSKAFVPTRIARLALHGRTGAGMRCHASAGRGAASVFDANRMLIELTGLESREVTRNELLRIEPLREGYAVEWRDVADGERAALPEPIVILRDAGQVAAGLASLLRDERKDTLVVASVDEIPFDRAGLIVDCRGIEARADAPAPALYEGALALFATAARRDLPCRIAVVLAPDAPAAAPLQALSRAVAMETPHLQTLALHAGDARAIRRGLDFIDRETEVAVRGEAVSAPRFDERALPRRADLALAGDATWLITGGLGELGLRVAGWLAALGARTLVLTGRRPADAAAEAVLAALRRDGVEVRVKQADVAVAADVDALLAEIDATLPPLRGIYHLAGVVEDRLVVDVTPESLAATLAGKAQGAWLLHERTRRHPLEHFVLFSSAAAAFGAAGQSTYAMANAYLDALAAHRRAQGLPAQSMAWGPWQDVGMLARTSATAKRRLAQLGIGQIDTECGRATFEIALAAELPPHIVLLPVDWPRLIEQWPPHVPASRFAGIATAQPGAGLTSSVSELLALPADERRPRLFALLAEDAAAVTGTPLASLDPERSLFDYDLDSLLITDLRVRLEKRFGRTISTTVIFSNPTIATLADHLARTLFGATDSAPATQPVPASAARAHAAEIEPSTDTAQLSQEEIVEMLSAKLDELRGAGAR

SEQ ID NO: 135 - protein, 1485 aa, Burkholderia rinojensis
MAAARAHPASSARALRAVLVGRRGIRRRGTVDLRDGERLPRRARRAPSRARAARAVDGLGAVAGRRHAGPHERDREAAARAAGHRPDRHRVRPRDLRDRAGGRAAAAHRAAAGRLAAPDRAVAAACAGEPLRRHRHRAAGRRPHVVGQRAAGAARRRTAAAPVRAAGGRRGGRDRHAARLARSGALAVRLRPRFAADHRSARAARKTFRPHDLDHGDFFESDHRHARGPSGAHAVRRDGQRSGDAAGAGFRRAGSRRRDRAVDRYGAAVSRGDRRNAVRETGRTSRSGGAMSQIDTTALMQNALREIERLQRKLGGVEQQLHAPIAVVGMGCRFAGADSPEALWQRLLDGADGVREVPAERWDAERYFDADPDASGRIYCRAGSFLDDVASFDAGFFGISAREAAMLDPQQRMLLEVVWEAIERAGIPAAELKGSATGVFAGVMHQDYAHRFRDADDVDLYTASGNAPSVLAGRVSHVLGLHGPTLTIDTACSSSLVAVHLACNALRAGECDIAIVGGVNVVLSPLSTAAECRAHMLSPSGRCRSFDDGADGFVRGEGCGVVVLQRLADAQAAGRAIDALIAGSAVNHDGRSAGLTVPNEHAQRELVRSALRAARIDASQVRYVEAHGTGTALGDPIEAAALASVFAGRAPDARVLLGSIKSNFGHLEGAAGIAGLIKAALAVRHGVVPATLHVRTPNRGIEWDTLPLRLALGNERIDAGDAPCVAGVSSFGFSGTNAHAVVVAPPRVDEGGAARDVAEAEVEAEAGACLLTVSAKSDASLRGNAARYADHLTGLDASAWAAACHASHVARSHFPHRLAVVAASADAMARELRRFARGEDAAVASGVCGAMPIGRAAATAEADAAQDPAARLAALAQRYVAGQPVDWPAAIVAGGRLAPLPTYAFDRQRYWVDERRANASSPLYRVAWQPAPAPAVSRRPGGRIVAGDPACCAAVARALDAVGERCTIVAAEIEAIRAAGSAEHGIVLAFDDAARESAREPVAAVARHGALLGALARHLAETPSAGPVTVVTRGALATGPAEDVDPVAAALSAAVRVARREQGEAWRGTIDVDGAPASFDTLAALLGDASAEEQQAVRGATVLVPRLRRAGAGAADAIPALDADAAYVVTGGTGALGLATARWLAGRGARHLLLISRGGETGEAVQAACARLRADGVEVRAAAADIADEDALREALATAGRPIRGVVHCAGVVRDAPLDTLDAAAFTAVLRAKVGGAVLLERLTDAQPLDFFLLYSSISVVVGRHGQAAYAAANAYLDALAQRRSARARPALSIGWGLWAAGMGAADARTAGRIRAGGLHPLGEAEAFAALEQAFTGEPHVIVAAIDLARIAAQPDLPRLIEGLTGRPPAPRARTLSFEQLRGRTADARRALVAEYLDAELRAVLSSPAALPHQTSLLDLGVDSLTGAELRNALERALGVSVAITHLIDGSSLDALIARVMTQVERRLVTEQTSAAGADTEEITL

SEQ ID NO: 136 - protein, 2516 aa, Burkholderia rinojensis
MLKAFVETSAAIPLNRIDILSKQERQLVLGEWNNTRQALPETTLEALVEQQVEKSPDAIAAVFDDQALTYRQLNAHANQLARMLVASGIGPESVVAVAIPRSLDLIVSLLAVVKAGAAYLPLDTDYPAERLAFMLRDAKPAALISRGDVLALLPETGSIPVLQIDGDALLAQLDTQPDHNLDNRTRVAPLSVLHPAYVIYTSGSTGTPKGAANTHVGIVNRLLWMQHAYQLQRDDAVLQKTPSSFDVSVWEFFWPLIAGARIVFARPDGHRDPAYLATLIQQQRITTAHFVPSMLEAFLLEPDAAQCENTLRRIVCSGEALSADLAKRAHATLGTPLHNLYGPTEAAVDVSYWAYRSDEVIGNAAPIGAPIWNLQLYILDEALRPVPPGVPGELYLAGAGLARGYLNRFSLTSERFVANPFTPGERMYRSGDLARWRHDGQIEYLGRTDHQVKIRGFRIELGEIEARLVDHEAVREAVVVAAGSDADKRLVAYVVAPAQAFSDEHASEHDAAQAMMNALRAHLAERLPEHMVPAAFIRLDAFPLTPNGKLDRKALPVPDQDAFVRQDYEAPQGEVETILADIWSELLGIDKVSRHDSFFALGGHSLLAVKLIERMRQRGLSLSIRDLFRTPTVIALAQTLGQHREIEVPANRITPETTAITPDLLPLIDLTQADIDHIVAQVPGGIANIQDIYALSPLQDGILFHHLMSTEGDPYLLTSQIAFATRDLLDRYLDAIQQVADRHDILRTIFAWQELSTPAQIVLRHAKLPIEEYRFDPEHGPIVHQLAQRVDPRHHRIDLTRAPLLQFAIAQDTSGRWILQMLLHHLAGDHSTLEIINAEVDAILSGRHDTLLRTVPFRNLVAQARFGISEAAHTRFFTTMLAGIDEPTLPFGLAEVHRDGSQISEAHLPLPRSLSDRLRAQAKRVGVSLASLCHLAWAQVLARTSGQHQVVFGTVLFGRMQAGDGSDRAMGLFINTLPIRLDLDDTPIEASVRTAHARLADLLVHEHASLALAQRCSGIPAGSPLFSALLNYRHSAPHPLHQVASTEVESLGSEERTNYPLTFSIDDFGDALGLTAQVVAPLDAARICGYMMQALHSLAEALETNPALPARQLNILPSDERRLLLDTWNAVGAHDTSAASLPQLFEAQVARAPSAPALVCGSRTLSYAELNTHANRLAHRLIRLGVRPDTLVGICVERSVATVVGLLAILKAGGAYVPLDPAYSGERLAHIVEDAAPRLLIADAAGRAALGDATLAPLTVLDPNETLDEPADNPVATDLAAHHLAYVIYTSGSTGKPKGVMVEHRNVTRLFDATHPWYGFDANDTWCLFHSFAFDFSVWEMWGALRYGGKLVIVPHAIARSPQDFHQLVCEQRVTVLNQTPSAFRTFIASQSHSTLRDRLRYVIFGGEALEPTMLQAWYATRDECAPQLVNMYGITETTVHVTYRPLLQHDSLAASSPIGERIPDLRIYVLDPSGEPAPIGAIGEMFVGGAGVARGYLSRPELNAERFLADPFSPLPGARLYKTGDLARFLPDGTLEFLGRNDQQVKIRGFRIEPGEIEARLVEHGMVREAVVLAVDADADKRLVAYFIADAAAPGDTPAAAALRAHLIERLPEYMVPAAFVQLDAFPLTPNGKLDRKALPAPDQDAFERQVYEAPQGDIEIALARIWSELLGIDAISRHDSFFALGGHSLLAVKLIERMRQRGLSLAIRDLFQAPTLAALAQSLGGHREIEVPVNRITPETRAITPDLLPLIDLTQADIDRIVERVPGGVSNIQDIYALSPLQDGILFHHLLSTDGDPYLVVGQLAFETRDLLDRYLNAVQKVVDRHDILRTAFVWEGVSTPAQVVWRNARLSVEECRLDSAHGPIAAQLAARFDPHHYRVDLTQAPLLRFAVTDNTDGRWILQLLLHHLIGDHSTLDILNQEVQALLLDPDQALPDAQPFRNLVAQARLGTSEAEHMRFFTSMLAGIDEPTLPFGLSEVHRDGARVRETQLMLPTVLNQRLRAQAKRANVSLASLCHLAWAQVLSRTSGRDQVVFGTVLFGRMQAGDGADRAMGLFINTLPIRLDLDDTPVEASVRAAHARLADLLAHEHASLALAQRCSSVPAESPLFSALLNYRHNAPDSLNPIAFDGISLGHAEERTTYPLVLSVEDFGQALGLTLQAIEALDAERVCRYMAQALESLADALEYGSGVAVRSLEVQPAAERALLLDEWNRTRRDHPTGATVQRLVEQQAERTPSAIAVRFGDVALSYGELNARANRLAHHLIELGARLDMPVAVCVERAPAMIVGVLAILKAGAAYLPLDPAYPADRLAHILDDANPGIVLADTAGLAAIGDAPLANRAVLDPNEALVDDSIVLHAGQASELNILLKLSAYPTTNPVVDGLSDRHLAYVIYTSGSTGVPKGVMVEHQNLVNLCHWHIDAFALRSGSTSAMTAGVAFDATTWELWPSLLSGGTLVLPPVHAARDPIALLDWWQQQQLDVSFLVTSLAVMAIDRKQLPPNLRYLLIGGERFPG

SEQ ID NO: 137 - protein, 2037 aa, Burkholderia rinojensis
MAAGRGRRATLGLARRTAGRHALGRDAAALRARRRGAGPRRPPARRLAVQHRAAPDADRHRPCRPVPRRAGRRAGPLPVAAGGRPHAIGPAARPSRPERYRRSATAIERAIMNPTLSNTAQQARSNVETMLPLTPTQQGLLFHTLKAPESGVYYEQVGCTFQAALDVADYRRALEAVVARHGVLRTGFLWDGPSKPVQVVFRHVELPWIEEDWRHLDRDEQQRRLAAYREADRRPGFHLSRAPLMRCALFRTGAQCYEFVWSYHHLLLDGWSVQIVLGEALACYDAYRRGDAPALPPPQPYSAFLRWLDAQDGAAAEAFWRARLGDVRAATPLPLADAARPGDASGHGTLERLLDPSASDALQQLARACEVTPSTVIQAAWALLLGRASGRDDVVFGTTVSGRPAGLRGVEQMVGLFVNALPTRVAIDPTLTLGDWFRRLHRQHVEAEAYAYTPLHVIPGWSGVAPGAPLFESLVVFENYPAHAAANRYREQLGVAGVEVVEQTNYPLTVVAIPGERLCLRVHFDRQRLAEASAARLLKMLATLLDQFLRGGAALRVGQVSLLGDEAGRALVAQWNAAARPAADPARLCLHRRFEAQARMRPDAIAVQYDGRSLSYAELERRANRLAWRLDAAGVRGNVPVALAFERGIDSIVAMLAVLKAGAFYVPLDLDHPPERLAWMLDDMQAGVLICDDARRERFDGFGGARLVIDADVEAAAVDTAAVETADVRAEAPPPRDASPTDLCYVIYTSGSTGQPKGVCIEHRNVDHLFAATRQTYGIGPTDVWTQFHSYAFDFSVWEIWGALLHGGRLEVVPYGCSRTPNAFLALLARAGVTMLSQTPTAFKQLLRALDDARQPLPASLRYVFFGGEATIPSQFAACLNDAHGVTLVNLYGITETTVHVTERVLGPGDAQSSRSPVGRPLPGYRVYLLDAAGHPVPPGVPGEIHVGGEGVARGYHNRPELDRARFVADPFAPGARLYRSGDLGRFDAHGELDYLGRIDDQVKIRGFRIELGEVEAALARHPEVAHAAVMVDDATVDGHAQLVGFMVLRDTGRVSGAALRDWLAQRLPPHALPARLIELDAIPLTTNGKLDRRRLVDALAADGDAARPHVAPRNAVEQTLADVFASVLKRSTVGVTDNFFELGGDSILSIQILSAAHKVSIDFSLDDLMQSLTIERLAPRVRPVGAAAPAPAAPAARATPSRDQPYDDAYPLSAMQMAMLANEMRHGHDSAYHNVNDQRLALPFDAAALEAALRGAFERHPALRTAFDLAADDEPLQYVHRRVPLPLTVRDWRGLDPVQQDTRIRDWRAAEQRLRFDVARPPLIRFTVHRLSDDTMHIGVTKHHAILDGWSFNLLLSELISDYAARLAGRALTLTAPASRFREFVEQERAAVGSDALRAWWRARLQALPVTRLTHEPDGDATPMAVPISAEQSARLEALAVRAGASVKSVLLTVHLLALSRITGMHAVTSGVVFNGRSEGVDGDRVLGLFLNSLPLSFDLTAGTRDAVALVRAVQATEMEIFSRRRYPLIELHRQIGTVFDVLFNFTHFRALEEAVRDIDVSEGYATDMTNVPLVVQSSVDGRHGVLRITLVPSRRYFSAGTVGRFVGHYTDAMRMMLGESGPAGQAADMTNAGDAARRGEASAPAGSAGGGVSAANAPAVARPHGAALRRELRALWAGVLKREVPSDTADFGALGGDSLLMLRICSRAGRAFGLDAQVVARLLTAQTVAEQARMIETDGAGGDGAQVGALVALSAPGDAPPLFFAPGAGGQASYLRALAAELPDAFAVWGMALPGPDEGGSGASRVESIAAALLADIRRVQPSGPYRLGGHSFGGWVAFEIARQLREQGEAVDWVAVVDSLPPGLTTQQSLKWNWSGGRWVAEIGNSFARLADAALVFDEGEFDGLDDARQVERLRARLIEAGIVPDELGLSEFAARVRAFIAHSLTDYAPATRYAGALRVIVAADDPDRDAGATERDARVDGWRAAAAGEVAAIRLPGDHVGIMRAPFVAGLAAALRAWPEPRAVSVMEIEGEQ

SEQ ID NO: 138 - protein, 2172 aa, Burkholderia rinojensis
MLRIRLELPPSAARRLVGADRARGSAGLLRRVPARRRAGLAAAPAVQRVPALARRAGRRGGRGVLARAPGRRPRGHAPAARRCRAARRRERPRHARTPARSERERCAATAGPRLRGHAEHGDPGRVGAAARPRERPRRRGVRHDRLRPARRPARRRADGRAVRQRAADARGHRPDAHARRLVPAPASAARRGRGVCIHAAARDSGLERRRARRAAVREPRGVRELSGARGGEPLSRAAGRGRRRGRRADQLPADRRRDSGRAPVPACALRSAAPRGSVGGAPAQDARDAARPVPARRRGAARRAGLAARRRGGPRAGRAVERGGAARRRPGAAVPAPTLRGPGADAAGCDRGAVRRPLAQLRRTRASREPARVAARCGGRARQRAGRARVRARHRQHRRDAGRAEGGRVLCPAGSRPSAGTARVDARRHAGRRADLRRRAARALRWLRRRAARDRCRCGGGRRGHGRRGDGRRPRRSAAAARCLAHRPLLCDLHVGFDRAAEGRVHRASQCRPPVRGDAADLRHRADGRLDPVPLLCVRLLGVGNLGRAAARRAARSGALRLLAHAERLSRAARARGRDDAEPDPDRVQAAAARAGRRAAAAAGEPALRVLRRRSDDSEPVRRVPERCARRHARQPVRDHRDHGPCDRARARPGRRAIVAQPGRPALARLSRLPARRGRASRAAGRAGRDPCRRRRRRARLSQPPRTRSRALRRRSVRARRAPVSQRRSRPLRCARRTRLSGPHRRSGQDPRLPDRAGRSGGGAGPAPGSRPRGGHGRRRDRRWPCAAGGVHGVARHRARVRRGAARLARAAPAAARAARAPDRARCDSAHDQRQARSPPARRRAGGRRRRGATARRAAQCGRADPGRCLRVGAQALDGRRHGQFLRAGRRLDPEHPDPVGRAQGQHRFLARRPDAVADHRAARAARAARRGGGAGPGRPGRARDAVARPAVRRRVSAQRDADGDARQRDAARPRLRLSQRQRSAPGPAVRRRRARSGAARRVRAPSGLAHRVRPGRRRRAAAVRASPRAVAADRARLARPRSRAAGHADPRLARGRAAPAVRCRASAADPLHRASSERRHDAYRRDQASRDPRRLELQSAAVRTDLRLRGAAGRPGADPHRAREPVSRVRRAGTRGGRLRRAARLVARAAPGAARHAAHARAGRRCDADGGADLGRAVGAPRSARGARGRVREERAADGASARAVAHHGHACGDERRRVQRAQRGRRRRPRAGPVPEQPAAQLRPDGRHPRRRRAGARGAGDRDGNLQSPALPADRTASADRHGVRRAVQLHALPRARGGRARHRRVRRLRDRHDERAARRAKQRRRPARRAADHAGAVAAVFLGGDRRPLRGPLHGRDAHDARRIRARRAGGRYDERGRRRPPRRGVGARGIGRGRGVRGQCARRRATAWRGAAARAARAVGGRAQARGAVRHGRFRRAGRRFAADAADLLAGGPGVRARRAGGGPPADGADGGRAGAHDRDGRRGRGRGPGRRARRAVRARRCAAVVLRARRGRAGVVSARARGRTAGCLRGLGHGAARARRRRLRREPRRIDRGGAARRHPARAAERPVPPRRPFVRRLGRLRDRAAIARTGRGGGLGRGRRQPAAGPHDAAVAQVELVGRALGRGDRQQLRAPRRCRARLRRRRIRRARRRAAGRASARAPDRGGHRAGRTRPVRIRGARARLHRAFADRLRPGDALRGRAARDRRRRRPGSRRGGDGARRARRRMARGGRGRGGGDPLARRSRRHHARAVRGRARRRPARVARAARRFSHGNRGRTMNTRVTAFAAVEAALAEPEAALANGDFEAVEGLMSDIRAANRRRGLWLPQVSRADGGLGLNLLELVEVGELLGRSPLGHYAVNYQAPDAGNIDVLLEYATPAQRQRWLEPLLRGEVRSCFAATEPESAGSNPSSLKTTAVRRDGAWHLSGRKWFASGADRAGFAIVLAVTDEAAPLHARTSTFIVPADAPGFRHVRNLRVMGDEGYGWASHGELALDACRVGEDAMLGKPGEGFVVLQARLATGRLHHCARWIGVCERAFAIMCRRACRRELAAGELLSSRQTVQNWIAESRASIDAARLLVAQAAARLQNRHERAQIDISIAKFFVAGVTQTVLDHALQVQGALGVSGDTILNVLWRHERAGRIYDGPDEVHKALVARHALAGFRREAS

SEQ ID NO: 139 - protein, 493 aa, Burkholderia rinojensis
MPGRRGRDARQARRRLRRAAGAARDRAAASLRALDRRVRARVRDHVPARVPARTRGRRAAVVAPDRAELDRREPRIDRRRAAARGPGGGAPAESPRARADRHLDREVLRGRRDADRPRSRAAGAGRAGRERRHDPQRALAARTRGAHLRRSGRSPQGAGRAPCARRLPAGGVMNARIAEQAMTALGRPGAAARATRIGGGRASEVFRVQGGERDVIAYWLPEGGVREAQRRFAVLDRLAGQFRLAPKPLAVGDAGAAALLLVERLGGVAPAACGPLGPGTVRRLAEQFVATLAALHALEIAPADRPPDYLRRILGEWRRRWNAEAAGAAVDADFRAVANWLAERIPDAAPAAFLHNDYKLDNILVDPGDPARVVGVVDWELAAVGHPLADLGAALAYWIEPGDSSLLRLDAPGPSCAPGAPTRAALVELYAAAAGRDVAEPAYWYAYGLLRLAVITQQLALRRRDEGQRVPRSALIVRWLLDRAAQACGSGRL

SEQ ID NO: 140 - protein, 301 aa, Burkholderia rinojensis
MNTEASTTPIDVIVIGGSHAGQSAALQIARARRRVLVIDAGARRNRFAAHSHGVIGQDGRSPDAIAADGRAQLLAYPNAQWRADTVVRAERTDTGYALHCASGQRYDARHLVLAFGVVDELPDLAGLRERWGQSVFHCPYCHGYELDQGRIGVLGSGPLSYLSAMLMPEWGETVFLTDGSFEPDEAQREALAQRGVEIVPERVARIVERASVELVDGRRLVFDGLFTMNRMRLSSAVAEQLGCVIEAGPLGPYVRTDDAMETSVPGVFACGDITHRGGTVALAIGNGALAGIAAHRKLVFA

SEQ ID NO: 141 - protein, 367 aa, Burkholderia rinojensis
MRWRPRCRACSRAATSRTGAAPWRSRSATARSRALPRIASWCSRDAPARRAGALPFLFIGNRSVSWQNVCFSWLLRRTAKSLTRKPTLTAQDMRARSAKWARGEAKPPRGWRVRQLDAQAVRGEWIEPDGDAPRDASGRVILYLHGGGYCFCSPLTHRTVAAALAQEADARAFSLDYRLAPEHPFPAAVDDTLAAYRALLDDGVRPDRIVVAGDSSGGGLALALLLSLRDAGEPLPAGAVLFSPWTDLAATGASLAANDASDVMLTAVAVKNFSRYYLGDTAADHPVASPLYGEYAGLPDLFIQASDSEVLLDDAARVARKASEAGVGVDFKVWRRLPHAWATLTPMLPEARAAIREAGGFIRKVAA

SEQ ID NO: 142 - protein, 565 aa, Burkholderia rinojensis
MFLVAVAPDGQIPDPQADPDGPGHARAQREVGARRGEAAARLARAPARRAGRARRVDRAGRRRAARCVRAGHPVPARRRLLLLFPADAPDRGRRARAGSGCARVLARLPTRAGASVSRRRRRYAGGLSRAPGRRREAGPDRGRGRFVGRRAGAGAAAVAARRGRAAAGRRGAVLAVDGSGGDGGVARRERCVRRDADGCRGEEFFPLLPRRHRRRSSGRLAALRRVCGLARPVHSGERFRGAAGRRRARGQEGERSRRRSGLQGVAAAAACVGHVDAHAARGEGGDPGSRRIHPQGGGMSYEWTPARGSTWVDAPPAGPHATLRLFCFPYAGGSATVFRGWAERFPATVDVRPMHPPGRGRRFHDALLYRVDQLADEATAAIAPLLDRPYALFGHSMGASVAFEVAQCLRERHLPQPACLIVAGRGAPHLDDPDPPIHGLPDHRFLEEVMRMNGTPDDVMTQPDIVKIILPVLRADFEAIEMYRPAPRPPLACRIVALGGRDEAGSVAAASSWRDYGTGGFREEIVPGDHFFLRGRADRVFEILNEELERIGAPGRNLPRRFDAR

SEQ ID NO: 143 - protein, 100 aa, Burkholderia rinojensis
MKCPACKTPDLLMTERQAIEIDYCPACRGVWLDRGELDKLIARADDARPAGRDAARAPSPSPSAARHDDWGQRGSAPRDGGHAHSGYRKKKSLFDLFDFD

SEQ ID NO: 144 - protein, 400 aa, Burkholderia rinojensis
MTKTEETMKPNDLQPSNWPLSQRARKLTSSAIREILKVTERPEVISFAGGLPSPATFPAERMREAADRVLRDAPGAALQYSATEGFLPLREWIAERYRVRVSQVLITTGSQQALDLLGKVLIDPDSPVLVETPTYLGALQSFSLYEPRYVQLPTDDAGLLPDQFTPELTRGARLLYAQPNFQNPTGRRTPVERRRALAAFAQSSPFPVLEDDPYGALNYAGEPLPSMLSMAPDHIVHLGTFSKVLAPGLRIGYIIAPEELHFKLVQAKQATDLHTPSLTQRIAYEVIRDGFLDTHIPTIRQLYSAQCEAMLASLARHMPEGVSWNRPEGGMFIWVKLPAGLDSMQLLDASIARNVAFVPGAPFFADDAQANTLRLSFVTVPPEKIEAGIAQLGALIRERL

SEQ ID NO: 145 - protein, 1713 aa, Chromobacterium haemolyticum
MGARPAYPEQLSIHGGHAMYSSSDVASRRTPAADKFGPHQAFSHREAPSIARQLLWRAEASPERLAYASADPEKALALSYAALCERASGIAARLAQATEAGERVMLVYQEPLDFLPAFFGCCLAGVIPVPVAPRHGRDTMAAIAQDCGAAIALSAEARDALPGLRWMRTDEAERATPFLRAAKDASPALLQYTSGSTRTPQGVVVTQTGLWATIDDLDRGAMHDADSAMISWLPYFHDMGLVYGILTPLQCGFPAYLMAPEKFVAQPMSWLRAIAARRGTHTAAPNFAYALCADRAGDLAPGTDLSSLRYALNGAEPVRCDTVRRFEAAFAPFGLRSSVVVPGYGLAEATLKVTAGRCGEGTRGVRFAREALARGRVSPQTDGVELAACGVSLIDTRVRIVDPDTRAPCAPDAVGEIWVTGSTVADSYWRRPEESREIFGARLADGDSAWLRTGDLGFLHEGDLFVTSRLKDLIIVGGRNVYSHDLEDTVSACHPSIRKGRAFAAAVDGEDGEGILIGAEVRGGCGEAEARDILPVIRAALAREHGVAPARIALLWRGSILRTSSGKTRRGATRDALLRGELRIVADDVAEAADDAILAEIARFVPGAAASPDARLIDLGLDSLSAARLAAAARARHDVELSFAALFALSARQLRREIVDAPRLDAAAPAAARRYAAGEAFELSEMQQAYWIGQQGGVPLGSVSPHIRVDFEIDAARAPELGRRLARLVARHPSLRMTVGADGRGAFDALAYDPLLPPQDLRGLDAAEAAERLEATRESLAERDGPPVLAVVSRLTESTAILHLRLSLLAGDLRSFLQLMAELARDAAEEAPAQCITPMTPPAATEAQREAWLRRVEAIAPAPELPMKMALAEVAEPRFANRRRELPAALSAALTARAQALGVTLTSLCIAAFADTLRLWTAAHAFTLNVTCNTRAEQAGLAIGDYTSNTLLSLSERHPSFAAFAQAVQRQVWADLDAPWCSGVSILRELSRRNGAPVLMPVVLTSLLSGDPADDLALLDGVGRVVDMANPTPQVSLHAILGRRGDRLVLMWESVAQLFPDGMVDAMFEVFLGALETMATDAAAVERPTLARLAPQQAARRAAVNATAAERAPRRLETPIVRQARIAPEAVAVRQGETTLSYGALLREAEDIAGALRQSGVARGEVVAAIVAPGPRAVAALLGIVMAGAVYLPIEPSWPAARIEELLGEAGARLALLSAAGPALPVPALRLDQPLPRGDAGPAADLEAGDAAYVIFTSGSTGRPKGVLIAHEAAANTIDDINQRFAVGPADRALCVSSLAFDLSVYDIFGLLAVGGEVVFPARSRDPDAMAQALSDGGVTIWNSVPAVLELMLEVSAPRSPHLRLALMSGDWIAPGLAGRLRDAFPALRPISLGGATEVSIWSVVHPIAPEDAVLASIPYGRPLSNQQCFVRAPDGRERPDGVVGELLLGGRGLALAYLGNEAETERRFFIDAEGRRLYRTGDLARWQPDGELELLGRMDGQVKVQGYRIELGEIEAAAMRAGCLARAVASVARRKDATVIQLHVVALPDHQGDVVAAVRTQLVLHLPAYMQPHHVMVLDALPLTANGKVDRARLAELAAPAPAPATPAAAARRDASLEATMLAAFAEVVGVEIDPRQGFFDAGATSMHIVRLRALLASRGVAVPPLVDFFSLATIRALAERADTGEADLSPMMDVDGARAYRQRVRARKEAL

SEQ ID NO: 146 - protein, 1555 aa, Chromobacterium haemolyticum
MTDATPVDAVAIIGASCRLPGVSTLEQFWSMIADGRVAIERFGADAARREGVPETVLAQPGFVGAGGPLDGVDQFDAAYFGIPPSQAAAMDPQQRIFLECVHEALERAGHGAARGARVGVWAGSASVDYLVDHVRDRLDRASPNRYLQQWVGVDKDYLATQVAYRLDFGGPAISLQTACSTSLVAVVQAMQGLLSFQCDFAVAGGVSVALPQRQGHVYEEGSILSADGACRPFTTDSSGTVFGNGAGVVVLRRLEDALADGDPIMAVIRGGAVNNDGAAKVGFTAPGGRGQQDVIRQALALSEVDGASIGYVETHGTGTAIGDEVELAALGAALGQRSGADARCALGTLKANVGHLNAAAGACGLIKAALAVAHGRIPAAVGAERAIDALRGDAGFYLPTETAPWDAPQRRAGVSSFGIGGTNAHVIIEAAPPRAPRTPDVAPLLLLSARGEALPALCADYADFLDGHPELRIEDVCLTAALGRRHWEQRAAFRAESREALIAALRAFAAGEPSAETIAAEVPARAPELSFAFGGAEDLDAVLARVQLWQASGVVPASVCATGSGVFAAAFAAGALSLEDARQRRAERAVAPSLLWISAASGLPLDSAEAVREELAGAGTAPGAADAAEALEAAGAEWVLDFGDTALGAGAAGMVSLDPASPDALARLWTAGLTLELSQHYRDGNRVALPTYPFQRQRHWIDRAPRFLAAGATPFLGRRTDAPALGATFFDAEWSVAALPFLQDHVIYDKVVVSGAALAVMMADGARALTGSDDCVLSDLRFPAALVIPSGAARKVQLQLVRDGDGFEATVLTLESADVHATARVDAGEAPGAAPLEPVRGEAISTELMDSWLRARSVVMGPTFRRLSDIVVGDGDASCDMRDDADDAGWLLHPGVLDSVLQLVAAAARPEGSKAFVPTRIARLALHGRTGAGMRCHASAERGQASLFDAGKVLLEMTGLESREVTRNELLRVEPLREGYAVEWRDAAGGEAAALPPSIAILSGAGDTAAGLAAMLRDEGKEAVVVAAVNDIPFDKAGLIVDCRGLEARGDAPAPAVYAGALELFATAARRERPCRIALALAPDAPASAPLQALSRAVAMETPHLQTLALHAGDARAIRRGLDYFERETEVAVKGEAVAAPRFDERALPLRADLALSADATWLITGGLGELGLRVASWLAALGARALVLTGRRPADAAAEAALAALRRDGVEVKVWQADVAAEADVDALLAEIDATMPPLRGVCHLAGVVEDCLVGDVTPASLAATLAGKARGAWLLHERTLAYPLEHFVLFSSAAAAFGAPGQSTYAMANAYLDALAARRRAQGLPALSIAWGPWQDVGMLARSSANAKRRLAQLGIGQIEAECGRATFEIALGADLPAHLVLLPIDWGRLIEQWPPHVPASRFAGIATAQPGAGSTSSVSELLALPAEERRHRLFQLLAEDAALVTGTPLASLDPERSLFDYDLDSLLITDLRVLLEKRFGRAIPTTVIFSNPTIAALADHLARTVFGMAEAEATPAAPAAEPDAPADAAMSQEEIVEMLSAKLKELDRKDAR

SEQ ID NO: 147 - protein, 1184 aa, Chromobacterium haemolyticum
MSQIDTTALMRNALREIERLQRELDGAEQRRHAPIAVVGMGCRFAGVDSPEALWQQLLDGADGVSEVPAERWDVERYFDADPDASGRIYCRTGSFLDDIASFDAGFFGISAREAAMLDPQQRMLLEVAWEAVERAGMTAAELKGSATGVFAGVMHQDYAHRFRRAEEVDLYTASGNAPSVLAGRVSHALGLHGPTLTIDTACSSSLVAVHLACNALRAGECDIAIVGGVNVVLSPLSTAAECRAHMLSPSGRCRSFDDGADGFVRGEGCGVVVLQRLADAEAAGRTIDALIAGSAVNHDGRSAGLTVPNEHAQRELVRAALRAARIDASQVNYIEAHGTGTALGDPIEAAALASVFAGRGREERVLLGSIKSNFGHLEGAAGIAGLIKAALTVRHGVVPATLHVRTPNRGIEWDTLPLRLALGAERIDAGGAPCVAGVSSFGFSGTNAHAVLLAPPRAAAGETAAGADEGAQLLVVSAKSDASLRGNAARLAAHLAGLDAAAWAAACHASRAARSHFPHRLALTAVSAEEMARELSRFARGEDAAVHSGVCGGMPPSRDASPETADAGREPAERLDALARRYVAGLPVDWPAPAGAGRRVARLPSYAFDRQPYWVDEGRAQAESPLYRIAWQPLPAPAGARRSGERIVAGDPALCAEVARALEAAGERCAIVPAEIDAIRRAGDAGLVLAFERAAGDEDALAAVARRGALLSALARERAATPSAAPITVVTRGGAATGPAEEVDPVLAALSAAVRVARREQGRSWRGTIDIDGSPASFDALAALLADEAAEEQLAVRGAAVLAPRLRRAGAGAAGALPALDGDAVYVVTGGTGALGLATARWLAGRGARHLLLISRGGEAGAAAQAACARLRGDGVEVRVAAADVADEAALRGALAAAGRPIRGVAHCAGIVRDATLDALDAAAFAETLRAKVGGAVLLDRLTEAEPLDFFLLYSSISAAVGRHGQAAYAAANGYLDALAQRRRLRARPALSIGWGSWAAGMGAADAKTAERIRAGGLNPLSEGEAFAALERAFTGEPHLVVAAIDLARIAAQPDLPPLIEGLVGRAPAANARTLSFDQLRGRPAGERRARVADYLDAELRAVLSSPAALPRQTSLLDLGVDSLTGAELRNALERALGVSVAISHLIDGSSLDELIDQVMAQLERKLVTEQHSAAGADTEEITL

SEQ ID NO: 148 - protein, 3184 aa, Chromobacterium haemolyticum
MNDNAVFPSRNPHAAAAPAETFAALFARSAADHPDAIALRHGARALSYRELDDQANRLAHYLRELGIDRETPVGLCLDRSPEQIIAMLAIFKAGGAYLPLDPDYPRERLAYILNDAMPAALLTRAALTEQLPVHWARVVELDTEQSIWQAQPDQALPLHDFPDQLAYLIYTSGSTGQPKGVAVTHRGIGALARAQSRRFGIAAGARVLQFASSSFDAAFSEVAMTLLSGACLVTAPAAELTPGAALADLLARQKISHLTLPPSALALMPDGGIPQDCGLIVAGEACPAAQVRRWSAGRTMLNAYGPTEATVCATMSGQMRDEAPADIGAPLPGVQAYVLDDALRPLPPGVEGELYLAGDGLARGYLGRPSLSAERFVANPFGPAGSRLYRSGDLARLRADGALDYLGRADEQLKLRGYRIEPGEIEHLLTQQAGVSQAVVRLREDLPGIKQLIAYVVSRAGLQADGAALRAALAEQLPDYMVPAAVVPLERLPLTPNGKVDKQALPAPDFENADAGEARDWLEKTLAKLYAEVLGLSRVGLGQGFFDLGGDSISAILLVSRARAHGLQFSPQDVFDHPCIERLALRVRPVDADAAAGELPPPSAADLESLRARYPAVSAVLPLSPLQRGLLFHLLYDEGQSDVYLIQMGFQLDGPLDADKLRAAAEGLLQRHHHLRAAFSADGLEQPAQIVLERVETPWRELDLSAHQADEQQRALEQLRADDYAAGVDPARAPLLRFTLVKLDAERHQLLWSFHHLLFDGWSVPVLLRELFALYRGDALPPAIPYRDYLAWLHTRDRDAAKRQWIKHLAGLEQPARLAPSASQSRQLPRNHNVTADPAVYAALERLARRQGLTLNTLLQAAWAILLARLSASDDVVFGVTVSGRPPELPGVERMVGLLINTVPLRLRLQPEETLTALLQRLQAQQAALIEHQHLSLAEIQQAAGLGDLFDTLLVFENYPIADDDRRVDDALSIGYLGGQGVDTSHYPLNLCAVPGPELELRFGYRPDLFSADAVDGIARQLLELLRLIAEQPELPLARIPPATPAQQDALAAWNRTDAPLPAATLTQLLERQAALSPDAEALRFDEAALSYRQLHQRANRLARRLRSDGVGPETLVAVALPRSIDLVVALLAVLKAGGAYLPIDLDYPPERIAFMLADAQPAVVLSRSELLAGLPVEHALCLDQIDDALETLSDAPLELPGDDRHPAYVIYTSGSTGRPKGAVNSHRAIVNRLLWMQHAYPLAADDVVLQKTPSSFDVSVWEFFWPLLAGASLLLARPDGHRDPVYLAELIRRRGVTTLHFVPSMLDAFLQEPASAGCASLRRVLCSGEALPAPLLARAAQTLPCPLHNLYGPTEAAVDVTAWTCDPVRDSRSVPIGHPIWNTQLFVLDAMLRPLPPGIPGELYLGGVGLARGYLRRPALTAERFVAHPFAAGQRLYRTGDRVVRREDGALDYLGRLDHQVKLRGLRIELGEIEAALLDQPGVAQAVVLIREDAPGQRRLVAYAVPAAGAQADVARWRDALAARLPDYMAPAAWVALDALPLTPNGKLDRRALPAPELTLAEHREPVTEKEKLLAEAFAQTLGLERVGLDDSFFHLGGDSISSIQLVSLARKRGLGLTPRQVFEHPSVRSLAQVAAEASALAVDARADAPLLRLGPAEIERLSRRRPGLAELLPLTPLQQGLLFHALYDHSAANPYVVQMRIELDGALDGAALRRAVERLLSRHPHLLASFIHEDTLQPMQALSLDSAAPWREADLSALSDDEARARLENMQTADHGESMPPDRGPLLRFTLIRLAPERHRLLWTFHHLLLDGWSLPVLLEELFALYRQGESAALPPAPAYRDYLLWLSGRDQAAARQAWGQYLRGVDEPTLVAPGLPAAERRPDLHTAALTAELSAALSAQARRRGLTLNTLAQAAWGLLLARLTGRDDLLFGITVSGRTAPLEDIARLPGLLINTVPLRLKLEPSATLAGWLDDLQSRQAAMMEHQHLGLGDIQQLTDMEELFDTLMVFENYPQLDALRQSRAGDGLSVRPVDGLGGDVSHYPLGLCVVPGERLELRLGCRADAFPPAAAERILASLTRLFQALAGDLERPLASLRWLDEAESRQLDGWNATTRATAPATLPELFRRQARLTPDAVAVCAGDVRLSYRQLDLQSNALAHRLRAAGVTVETPVALWLRRGPLLPVAILGVLKAGGCYIPLHTAQPEERRAWTLTQSRAALLLADEAPAPAMLPPGLPVLRIDGPSDSAEHPPRLELTPDALAYVMYTSGSTGVPKGIAVSHANVGDLALDRRWEGASQSKVLLHSPHAFDASTYELWTPLLHGGQATLAPPGDNDIDSLADVLRRESVTAAFLTTALFNLLAEERPDCFASLRTLWTGGEAASLRAFQRVRERHPELELVHVYGPTETTTFATCYPLPRDQPLAAPLPIGAPMDNTRAYVLDSALRPLPVGAPGELYLAGSGLARGYLDQPALSAERFVANPFGPAGSRLYRSGDRARWRADGQLEFLGRADQQIKLRGFRIELSEIEARLSEHPAVSQARAVLRETDGAPRQLLAYVALHPGADIAPSALRQALAAQLPDYMVPAAVVALDALPLTPNGKLDHRALPAPDFQAGERRPPRSDAERILAGLYAELLGLDEVGLDDGFFDLGGDSIASILLVSRARRQGLLLSPREVFLHPRVEALAAVARPVVAVAAEDTAEGPLPATPIIRWWLERGGPQSGFYQSMLLQTPAGLEQAHLLQALQALLDKHDALRMRLDADGGLTVPPPASTSAQDCLRRIAADAHLEIPPADIAAAARQLDPAAGAMLRALWLDAGPDAPGRLWLGIHHLAVDGVSWRILLPDLASAWREARAGQAIRLDPVATSFRRWALLLNEDAVRAARAAEAPMWAAIQDQPDPPLSPCPLDPALDTAGASRRLSVALPSAVTADLLTQVPALFHAGINDVLLTGFALAVARWRHGRGRDGGSAVRLELEGHGREELGEHCDLSRTVGWFTSLFPVCLDPGASAAAALDDDAVLGAALKRVKEQLRALPDRGLGYGLLRYLNPETAARLSGAAPAQLGFNYLGRFSTPARGDWMPAPEAAGLDGNSDSSTPQTHAIELNAATHDGPDGPELVATWLWAGRLFDRQEIEKLAEDWFDALRALARLGRAPDAGGSTPSDHPLAGGLSQEEIDLIEAGF

SEQ ID NO: 149 - protein, 1905 aa, Chromobacterium haemolyticum
MNKTLSNAAQQAGSKVETMLPLTPTQQGLLFHTLKAPESGVYYEQVACAFQVALDAADYRRALEAVIARHGVLRTGFLWDGPSKPVQVVFRDVELPWVEEDWRAFDPEEQRRRLAAYRDEDRRPGFHLSRAPLMRCALFRTGEERYEFVWSYHHLLLDGWSVQIVLGEALACYDAYRRGADPALPPPQPYSAFLRWLDQQDGAAAEAFWRERLGDVRAATPLPLAEEAGPEHACGHGLLERELDPRTSEGLQRLARACELTQSTVIQAAWALLLARASGRDDVVFGTTVSGRPAELRGVEQMVGLFVNALPTRATVDAAQTLGDWLRQLHRRHVDAEAYAYTPLHAIPGWSGVAPGAPLFESLVVFENYPARADATRYRERLGVGDVEVVEQTNYPLTVVAIPGERLRLRLHYDRQRVSEASAERIVAMLARLLEQFERGGAALRIGAASLLGAEAGGALVAGWNAAARRADETARQCLHRRFEAQARARPDAVALQCEGEALTYAELDRRANRLAWRLDAAGVRGDTPVALAFGRGVDSIVAILAVLKAGAFYVPLDLDHPPERLAWILEDIGAGALICGEEARERFGDFGGVLIGMGDAAESGEREDAPPPRDTSPADLCYVIYTSGSTGQPKGVCVEHRNVDHLFAATRRSYGIGPSDVWTLFHSYAFDFSVWEIWGALLHGGRLEIVPYRCSRTPEAFLALLEREGVTMLSQTPSAFKQLLRALGDARRPLPAGLRHVFFGGEALIPSQFAACLGEESGVALVNLYGITETTVHVTERVLGAGDARSSRSPVGRPLPGYRIYLLDAAGHPVPPGVPGEIYVGGEGVARGYHKRPELDRERFIADPFLPGERLYRSGDLGRWDADGELDYLGRIDEQVKIRGFRIELGEVEAALARHPDVAAAAVMVDEASIDGHAQLAGFAAPREGASLSPAALRDWLAQRLPPHAIPARLIEVDAIPLTPNGKLDRRRLADALAADGDAARPHVAPRDAVEQALVGVFESVLKRSPVGVTDNFFELGGDSILSIQILSAAHKVGIDFTLDELMRSLTIARLAPRVRRTDSPPPAASAPPPPLDAAYEDVYPLSAMQMAMLANEMRHGQDSAYHNVNDQRLALPFDAAALEAALRGAFERHPALRTAFDLAADEEPLQYVHRQVPLPLAVSDWRGLDAARQDARILDWREAERRRRFDVEHPPLIRFAVHRLSEEEMHIGVTKHHAILDGWSFNLLLSELISDYSARLAGRPLALTAPASRYRDFVEREREAARSDALRDWWRARLQSLPATRLAREPDGDAAPAEVPISAAESAGLEALAARAGASVKSVLLTAHLLALSRICGRPAVTSGVVFNGRSEGADGDRVLGLFLNSLPLGFDFPAGVFDAVALVRAVQAAELEVFSRRRYPLIELHRQVGTVFDALFNFTHFRALEDAVRDIEVSDGYASDTTNVPLVVQSSFDGRQGVLRITLVPSRGHFSTETVVRFVAEYVAALRALLGETTAGDAAAGGASRADGGERRSLASAAATPAAAKAPAAARPSGAALRRELSALWTAVLKREPPSEDSDFSALGGDSLLMLRICSRAGRAFGLDAAVVARLLTAQTVAEQARIIETEGADADGVRVGALVALSAPGDAPPLFFAPGAGGHVPYLRALAAELSKDFSVWGMELPGSGEADAGGVEAIATALIADIRRVRPYGPYRLGGHSFGGWVALEIARQLAGQGEAVAWVSIVDSLPPGSAARPHKRDWRDSRWMAEIGNSFARLADAKLLFDADEFDALDDARRVERLRERLIAAGVLPEELGLPEFAARVRAFIAHSLTDYAPATPYAGALHLIVAADRDGEADAPDAAALIDGWRAAAPAAATALRLPGDHVGIMRPPFVSGLAGALRAMEAAARRAVSDMETEEEQ

SEQ ID NO: 150 - protein, 390 aa, Chromobacterium haemolyticum
MNTRVKAFAAVEAALAEPEAALANGDFETVEQLMSGIRAANRAHGLWLPQVPRADGGLGLNLLELVEVGELLGASPLGHYAVNYQAPDAGNIDVLLEYATPAQRRRWLEPLLRGELRSCFAATEPESAGSNPSSLKTTAVYRDGAWHLNGRKWFASGADGAGFAIVLAVTDEAAPLHARTSTFIVPADAPGFRHVRNLRVMGDEGCGWASHGELVLDDCRVGEDAMLGKPGEGFVVLQARLATGRLHHCARWIGVCERAFAIMCRRACRRELAAGELLSSRQTVQNWIAESRASIDAARLLVTQAATRLQNRHERAQIDISIAKFFVAGVTQTVLDHALQVQGALGVSGDTILNVLWRHERAGRIYDGPDEVHKSLVARHALAGFRRELA

SEQ ID NO: 151 - protein, 559 aa, Chromobacterium haemolyticum
MVRVRRRRRGLRHRAGRHRRGRAAARAHQHLHRARRRARLPPRPQSAGDGGRGLRLGQPRRTGAGRLPGGRGRDAGQARRGLRRAAGQARHRAAAPLRALDRRVRARLRHHVPARLPPGTGGGRAAVLAPDGAELDRREPRVDRRRAPAGDPGGHAAAKPPRARADRHLDREVLRGRRDADRARSRAAGAGRIGRQRRHDSQCAVAARTRGADLRRPGRSAQEPGGAPCAGRLPAGAGMSARIAERAMAALGRPRVGARATRVGGGRASEVFLVQGGDSELIAYWLPEGGAREARRRYALLERLSGQFRLAPRPLAVDEDGDAALLLVEKLDGVAPAACGALGPDTVRRLAENFIETLASLHALEVAPADRPPDYLRRILSEWRRRWNAEEAGAAVDADFRAVADWLSERMPQTAPSAWLHNDYKLDNILVDPGDPARLVGVVDWELAAVGHPLADLGAALAYWIEGRDSSLLRLDAPGPSCAPGAPTRAALVDLYAAAAGREVTEPAYWYAYGLLRLAVITQQLALRRRDEGQRVPRAKLIVRWLLDRAAEACGGGRL

SEQ ID NO: 152 - protein, 301 aa, Chromobacterium haemolyticum
MNTETSTTVFDVIVIGGSHAGQSAALQIARARRRVLVIDAGARRNRFAAQSHGVIGLDGRSPDAIAADGKAQLLAYPNAQWRADTVVRAESGEAGYALRCASGQSYAARQLVLAFGVVDELPELEGLRERWGESVFHCPYCHGYELKQGRIGVLGGGPLSYLSAMLMPEWGPTVFLSDGGFEPDAAQREALAQRGVDIVRERIARIVERATVELADGRRLAFDGLFMMNRFRLSGPVAEQLGCVIEEGPLGPYVRTDDAMETSAPGVFACGDITQRGGTVALAIGNGALAGIAAHRKLVFG

SEQ ID NO: 153 - protein, 370 aa, Chromobacterium haemolyticum
MCGPTTRWKHRRRAYSPAATSRSGAAPWRWPSATARWRASPRIANWCSDKPRATADFFLFMTGKRFMSWQNLCFSWLLRRTAKSLTRKPGLTAQEMRERSAKWARGEIKPPRGWRVRKLDAEALRGEWIEPEAPARREASGRVILYLHGGGYCFCSPLTHRGVAAALAREADARAFSLAYRLAPEHPFPAAVDDALAAYRGLLDEGVAPERIVVAGDSSGGGLALALLLSLRDAGAPMPAGAVLFSPWTDLAATGASLEANDASDVMLSAVAVRNFSRYYLGDAAADHPIASPLYGEYAGLPDLFIQASDSEVLLDDAARVASKASAAGVGVDFKVWRRLPHAWATLTPMLPEARAAIKEAGGFIRKVAP

SEQ ID NO: 154 - protein, 199 aa, Chromobacterium haemolyticum
MHPPGRGRRFHDPLRYRLDQQADEATDAIAPLLDRPYALFGHSMGASLAFEVAQRARARGLPAPCCLIVSGRAAPHLPPRGRPIHGLPDDEFLDEVMRMNGTPAEVLAHPELVQVILPVLHADFEAIETYRPAPRPPLSCRIVALGGSEEEGGVEAAASWQGYATGGFRSEILPGDHFFLNGRPESLFAILKEELGRAV

SEQ ID NO: 155 - protein, 111 aa, Chromobacterium haemolyticum
MRWRGSSIAFSRPTAPVRRAEEHAMNCPSCQVTLLMGERLSVAIDYCPQCRGVWLAPGQLERLLQTQAPAAPAAAYAPSAHGRGHDDEHRRDSRHGGHHGGKHGWLRKLLD

SEQ ID NO: 156 - protein, 155 aa, Chromobacterium haemolyticum
MADLSPSDDMRAAMEAFFHAYKAFTDKPDEMLAKRGLARVHHRILFFVARYPGLSVKDLLAALGVTKQAINMPLRQLLEMALVQSVAAQHDKRVKQLTLTSEGRKLEEALHREQLKLLQTAFEQTGKPATAGWMQINRSLASHSRPDDAPSRGKA

SEQ ID NO: 157 - protein, 389 aa, Chromobacterium haemolyticum
MQSTMFSERIERLSGSLIREILAAAQQPQMISFAGGLPAGQCLPQLDFTDMPAGLAQYGASEGEPELRGLIAEQARRMGIACEAEQVLVLSGSQQSIDLCAKLFIDPGTPVVTEGPTYLAALQAFKLFGARVHAVAQREGRLEPQALAAALSESQARCSYLIPSFQNPAGSCYSAEDRQALAAVIDAAGVPLIEDDPYRALSYDGEAPAPLVSHLKRAPWIYSGSFSKTLAPGLRVGFLIASPELYPYLMRLKQATDLHTNRPAQWFIARQLSDPGHEQRMLDLREVYRAGRDAMQDSLQRHFGDLADWQLPRGGLFFWLKLKRTRDTRALLPLALKQNVAFMPGEAFFPEPEQNLGYLRLNFSHASPERIEIGIARLAALLRDTAAAE

SEQ ID NO: 158 - protein, 1762 aa, Chromobacterium haemolyticum
MGRATARPVFKVLAIVAALVAAERVTGRRRKPARLGRRDDSSHAIWVDSMGARPAYPEQLSIHGGHAMYSSSDVASRRTPAADKFGSHQAFSHREAPSIARQLLWRAEASPERLAYASADPEKALALSYAALCERASGIAARLAQATEAGERVMLVYQEPLDFLPAFFGCCLAGVIPVPVAPRHGRDTMAAIAQDCGAAIALSAEARDALPGLRWMRTDEAERAAPFLRAAKDASPALLQYTSGSTRTPQGVVVTQTGLWATIDDLDRGAMHDADSAMISWLPYFHDMGLVYGILTPLQCGFPAYLMAPEKFVAQPMSWLRAIAARRGTHTAAPNFAYALCADRAGDLAPGTDLSSLRYALNGAEPVRCDTVRRFEAAFAPFGLRSSVVVPGYGLAEATLKVTAGRCGEGTRGVRFAREALARGRVSPQTDGVELAACGVSLIDTRVRIVDPDTRAPCAPDAVGEIWVTGSTVADSYWRRPEESREIFGARLADGDSAWLRTGDLGFLHEGDLFVTSRLKDLIIVGGRNVYSHDLEDTVSACHPSIRKGRAFAAAVDGEDGEGILIGAEVRGGCGEAEARDILPVIRAALAREHGVAPARIALLWRGSILRTSSGKTRRGATRDALLRGELRIVADDAAEAADDAILAEIARFVPGVAASPDARLIDLGLDSLSAARLAAAARARHGVELSFAALFALSARQLRREIVDAPRLDAAAPAAARRYAAGEAFELSEMQQAYWIGQQGGVPLGSVSPHIRVDFEIDAARAPELGRRLARLVARHPSLRMTVGADGRGAFDALAYDPLLPPQDLRGLDAAEAAERLEATRESLAERDGPPVLAVVSRLTESAAILHLRLSLLAGDLRSFLQLMAELARDAADEAPAQCITPMTPPAATEAQREAWLRRVEAIAPAPELPMKMALAEVAEPRFANRRRELPAAMSAALTARAQALGVTLTSLCIAAFADTLRLWTAAHAFTLNVTCNTRAEQAGLAIGDYTSNTLLSLSERHPSFAAFAQAVQRQVWADLDAPWCSGVSILRELSRRNGAPVLMPVVLTSLLSGDPADDLALLDGVGRVVDMANPTPQVSLHAVLGRRGDRLVLMWESVAQLFPDGMVDAMFEVFLGALETMATDAAAVERPTLARLAPQQAARRAAVNATAAERAPRRLETPIVQQARIAPEAVAVRQGGTTLSYGALLREAEDIAGALRQSGVARGEVVAAIVAPGPRAVAALLGIVMAGAVYLPIEPSWPAARIEELLSEAGARLALLSAAGPALPVPALRLDQPLPRGDAGPAADLEAGDAAYVIFTSGSTGRPKGVLIAHEAAANTIDDINQRFAVGPADRALCVSSLAFDLSVYDIFGLLAVGGEVVFPARSRDPDAMAQALSDGGVTIWNSVPAVLELMLEVSAPRSPHLRLALMSGDWIAPGLAGRLRDAFPALRPISLGGATEVSIWSVVHPIAPEDAVLASIPYGRPLSNQQCFVRAPDGRERPDGVVGELLLGGRGLALAYLGNEAETERRFFIDAEGRRLYRTGDLARWQPDGELELLGRMDGQVKVQGYRIELGEIEAAAMRAGCLARAVASVARRKDATVIQLHVVALPDHQGDVVAAVRTQLVLHLPAYMQPHHVMVLDALPLTANGKVDRARLAELAAPAPAPATPAAAARRDASLEATMLAAFAEVVGVEIDPRQGFFDAGATSMHIVRLRALLASRGVAVPPLVDFFSLATIRALAERADTGEADLSPMMDVDGARAYRQRVRARKEAL

SEQ ID NO: 159 - protein, 1558 aa, Chromobacterium haemolyticum
MTDATPVDAVAIIGASCRLPGVSTLEQFWSMIADGRVAIERFGADAARREGVPETVLAQPGFVGAGGPLDGVDQFDAAYFGIPPSQAAAMDPQQRIFLECVHEALERAGHGAARGARVGVWAGSASVDYLVDHVRDRLDRASPNRYLQQWVGVDKDYLATQVAYRLDFGGPAISLQTACSTSLVAVVQAMQGLLSFQCDFAVAGGVSVALPQRQGHVYEEGSILSADGACRPFTTDSSGTVFGNGAGVVVLRRLEDALADGDPIMAVIRGGAVNNDGAAKVGFTAPGGRGQQDVIRQALALSEVDGASIGYVETHGTGTAIGDEVELAALGAALGQRSAADARCALGTLKANVGHLNAAAGACGLIKAALAVEHGRIPAAVGAERAIDALRGDAGFYLPTETAPWDAPQRRAGVSSFGIGGTNAHVIIEAAPPRAPRAPRTPDVAPLLLLSARGEALPALCADYADFLDGHPELRIEDVCLTAALGRRHWEQRAAFRAESREALIAALRAFAAGEPSAETIAAEVPARAPELSFAFGGAEDLDAVLARVQLWQASGVVPASVCATGSGVFAAAFAAGALSLEDARQRRAERAVAPSLLWISAASGLPLDSAEAVREELAGAGTAPGAAAAAEALEAAGAEWVLDFGDTALGAGAAGMVSLDPASPDALARLWTAGLTLELSQHYRDGNRVVLPTYPFQRQRHWIDRAPRFLAAGATPFLGRRTDAPALGATFFDAEWSVAVLPFLQDHVIYDKVVVSGAALAVMMADGARALTGSDGCVLSDLRFPAALVIPSGAARKVQLQLVRDGDGFEATVLTLESADVHATARVDAGEAPGAAPAEPVRGEAISTELLDSWLRARSVVMGPTFRRLSDIVVGDGDASCDMRDDADDAGWLLHPGVLDSVLQLVAAAARPEGSKAFVPTRIARLALHGRTGAGMRCHASAERGQASLFDAGKVLLEMTGLESREVTRNELLRVEPLREGYAVEWRDAAGGEAAALPATIAILSGAGDTAAGLAAMLRDEGKEAVVVAAVNDIPFDKAGLIVDCRGLEARGDAPAPAVYAGALELFATAARRERPCRIALALAPDAPASAPLQALSRAVAMETPHLQTLALHAGDARAIRRGLDYFERETEVAVKGEAVAAPRFDERALPLRADLALSADATWLITGGLGELGLRVASWLAALGARALVLTGRRPADAAAEAALAALRRDGVEVKVWQADVAAEADVDALLAEIDATMPPLRGVCHLAGVVEDCLVGDVTPASLAATLAGKARGAWLLHERTLAYPLEHFVLFSSAAAAFGAPGQSTYAMANAYLDALAARRRAQGLPALSIAWGPWQDVGMLARSSANAKRRLAQLGIGQIEAECGRATFEIALGADLPAHLVLLPIDWGRLIEQWPPHVPASRFAGIATAQPGAGSTSSVSELLALPAEERRHRLFQLLAEDAALVTGTPLASLDPERSLFDYDLDSLLITDLRVLLEKRFGRAIPTTVIFSNPTIAALADHLARTVFGMAEAEATPAAPAAEPDAPADAAMSQEEIVEMLSAKLKELNRKDAR

SEQ ID NO: 160 - protein, 1183 aa, Chromobacterium haemolyticum
MSQIDTTALMRNALREIERLQRELDGAEQRRHAPIAVVGMGCRFAGVDSPEALWQRLLDGADGVSEVPAERWDVERYFDADPDASGRIYCRTGSFLDDIASFDAGFFGISAREAAMLDPQQRMLLEVSWEAVERAGMTAAELKGSATGVFAGVMHQDYAHRFRRAEEVDLYTASGNAPSVLAGRVSHALGLHGPTLTIDTACSSSLVAVHLACNALRAGECDIAIVGGVNVVLSPLSTAAECRAHMLSPSGRCRSFDDGADGFVRGEGCGVVVLQRLADAEAAGRTIDALIAGSAVNHDGRSAGLTVPNEHAQRELVRAALRAARIDASQVNYIEAHGTGTALGDPIEAAALASVFAGRGREERVLLGSIKSNFGHLEGAAGIAGLIKAALTVRHGVVPATLHVRTPNRGIDWDTLPLRLALGAERIDAGGAPCVAGVSSFGFSGTNAHAVLLAPPRAAAGETAAGADEGAQLLVVSAKSDASLRGNAARLAAHLAGLDAAAWAAACHASRAARSHFPHRLALTAASAEEMARELSRFARGEDAAVHSGVCGGMPPSRDASPETADAGREPAERLDALARRYVAGLPVDWPTPAGAGRRVARLPSYAFDRQPYWVDEGRAQAESPLYRIAWQPLPAPAGARRSGERIVAGDPALCAEVARGLEAAGERCAIAPAEIDAIRRAGDAGLVLAFDRAAGDEDALAAVARRGALLSALARERAATPSAAPITVVTRGGAATGPAEEVDPVLAALSAAVRVARREQGRSWRGTIDIDGSPASFDALAALLADEAAEEQLAVRGATVLAPRLRRAGASTGALPALDGDAVYVVTGGTGALGLATARWLAGRGARHLLLISRGGEAGAAAQAACARLRGDGVEVRVAAADVADEAALRGALAAAGRPIRGVAHCAGIVRDATLDALDAAAFAETLRAKVGGAVLLDRLTEAEPLDFFLLYSSISAAVGRHGQAAYAAANGYLDALAQRRRLRARPALSIGWGSWAAGMGAADAKTAERIRAGGLNPLSEGEAFAALEREFTGEPHLVVAAIDLARIAAQPDLPPLIEGLIGRAPAANARTLSFDQLRGRPAGERRARVADYLDAELRAVLSSPAALPRQTSLLDLGVDSLTGAELRNALERALGVSVAISHLIDGSSLDELIDQVMAQLERKLVTEQHSAAGADTEEITL

SEQ ID NO: 161 - protein, 2834 aa, Chromobacterium haemolyticum
MNDNAVFPSRNPHAAAAPAETFAALFARSAADHPDAIALRHGARALSYRELDGQANRLAHYLRELGIDRETPVGLCLDRSPEQIIAMLAIFKAGGAYLPLDPDYPRERLAYILNDAMPAALLTRAALTEQLPVHWARVVELDTEQSIWQAQPDQALPLHDFPDQLAYLIYTSGSTGQPKGVAVTHRGIGALARAQSRRFGIAAGARVLQFASSSFDAAFSEVAMTLLSGACLVTAPAAELTPGAALADLLARQKISHLTLPPSALALMPDGGIPQDCGLIVAGEACPAAQVRRWSAGRTMLNAYGPTEATVCATMSGQMRDEAPADIGAPLPGVQAYVLDDALRPLPPGVEGELYLAGDGLARGYLGRPSLSAERFVANPFGPAGSRLYRSGDLARLRADGALDYLGRTDEQLKLRGYRIEPGEIEHLLTQQAGVSQAVVRLREDLPGIKQLIAYVVSRAGLQADGAALRAALAEQLPDYMVPAAVVPLERLPLTPNGKVDKQALPAPDFENADAGEARDWLEKTLAKLYAEVLGLSRVGLGQGFFDLGGDSISAILLVSRARAHGLQFSPQDVFDHPCIERLALRVRPVDADAAAGELPPPSAADLESIRAHYPAVSAVLPLSPLQRGLLFHLLYDEGQSDVYLIQMGFQLDGPLDADKLRAAAEGLLQRHHHLRAAFSADGLEQPAQIVLERVETPWRELDLSAHQADEQQRALERLRADDYAAGVDPARAPLLRFTLVKLDAERHQLLWSFHHLLFDGWSVPVLLRELFALYRGDALPPAIPYRDYLAWLHTRDRDAAKRQWIKHLAGLEQPARLVPNASQSRQLPRNHNVTADPAVYAALERLARRQGLTLNTLLQAAWAILLARLSASDDVVFGVTVSGRPPELPGVERMVGLLINTVPLRLRLQPEETLTALLQRLQAQQAALIEHQHLSLAEIQQAAGLGDLFDTLLVFENYPIADDDRRVDDALSIGYLGGQGVDTSHYPLNLCAVPGPELELRFGYRPDLFSADAVDGIARQLLELLCLIAEQPELPLARIPPTTPAQQDALAAWNRTDAPLPAATLTQLLERQAALSPDAEALRFDEAALSYRQLHQRANRLARRLRADGVGPETLVAVALPRSIDLVVALLAVLKAGGAYLPLDLDYPAERIAFMLADAQPAVVLSRSEPLAGLPVERALCLDQLDQTLSDAPLELPGDDRHPAYVIYTSGSTGRPKGAVNSHRAIVNRLLWMQHAYPLADDDVVLQKTPSSFDVSVWEFFWPLIAGASLLLARPDGHRDPVYLAELIRRRGVTTLHFVPSMLDAFLQEPASAGCASLRRVLCSGEALPAPLLARAAQTLPCPLHNLYGPTEAAVDVTAWTCDPVRDSRSVPIGHPIWNTQLFVLDAMLRPLPPGIPGELYLGGVGLARGYLRRPALTAERFVAHPFAAGQRLYRTGDRVVRREDGALDYLGRLDHQVKLRGLRIELGEIEAALLDQPGVAQAVALIREDAPGQRRLVAYTVPAAGIEVDVARWRDALAARLPDYMVPAAWVPLDALPLTPNGKLDRRALPAPELTLAEHREPVTEKEKLLAEAFAQTLGLERVGLDDSFFNLGGDSLLALRLKGLALKAGVSFELASLFEHHSVALLAAHAEQAAAAAAPAEPFSLLDPADRRRLPPDAVDAYPLSQLQQGMLFHSAFRDGSTLYHNIVGLAVSLPYDAAALRRALDALCRRHELLRTRFALDGYLEPLQLVLATAAIPLAESDLGQLPPAAQQDTLAAFIAAWSKQAFDPGAAPLLHAHAHRLGERRFNLTLRIHHAILDGWSDSVFIVELAQLYQAELADQPCRLPALTSRYRDYIALEREAMASPASRDFWREQLRGYEAAAALLAREENAAVAADGPLQIHADIAIDEPVSTALTALARRLNAPLKSVLLAAHLAALAMLTGKSGACTALVTNGRPETADAEHMVGLFLNSVPLRMEIRREPWTRLISRVIDAERALLPHRRYPLATMLRDAGLRDAGEAIFNYTHFQALEALADWRQQDSAMDNSFALQINFRPDGARIVGSLTAHRDAHDADALRRYARCYAAVLAQLAGDPDGPVRRLDLLDEDERRLLLDEQASARDIAPLPLCELFERQVRRAPDAPALDYDGETLSYAELNRRANRLGRRLIAAGVGPGRLVAVALPKSAALLVSQLATLKAGAAYLPLDLNYPAERLALMLDDARPALVLSDAGSAARLPQTAGPVMRPEADDSFADGDIGQQERLRPLTADDLAYVIYTSGSTGRPKGVAVGHAGLASLAQDLKERCALDTSARVLQFSSPGFDASVLEMLMAFAGGACLVPANARQLDADSLPGTLRTARVSHALLPPALLAMLEPAPDLLPGALLVGADACPAEVVAKWARGRRMINAYGPTESTICATLSDRLTDGAPPIGRPVLNSQVYLLDEALQPVPAGVAGELYVAGAGLARGYLNRPALSAERFVANPFGAPGSRLYRSGDKARRLADGQLEFLGRLDQQIKLRGYRIEPGEIEAALRSQTGVAQAVVLPVDDDGRKRLVAYAVPRAGASLDGARLRAGLAAGLPDYMVPAAVTVLPALPLNAHGKLDRGALPAPVFAAAPQRLPATPLEQTLAALFAETLRLPAVDLDAGFFELGGDSLLAMRLAALIRGKLGVRLSMEQLFLAPSVAELARRPAFGRPDEPSSAAGGRSFWLTVRRQDGAPVSLRCDGELELPALRQALRTLGRRHAALNAPAETGATIKSANGLALPAALRQAADSGAGAPIAPLLRELAQAYAARADGGAPDWTPLPRPYADYADYAASRAELSQATAPSGTPASRPFPPSSTTLEQA

SEQ ID NO: 162 - protein, 1905 aa, Chromobacterium haemolyticum
MNKTLSNAAQQAGSKVETMLPLTPTQQGLLFHTLKAPESGVYYEQVACAFQVALDAADYRRALEAVIARHGVLRTGFLWDGPSKPVQVVFRDVELPWVEEDWRAFDPEEQRRCLAAYRDEDRRPGFHLSRAPLMRCALFRTGEERYEFVWSYHHLLLDGWSVQIVLGEALACYDAYRRGADPALPPPQPYSAFLRWLDQQDGAAAEAFWRERLGDVRAATPLPLAEEAGPERASGHGLLERELDPRTSEGLQRLARACELTQSTVIQAAWALLLARASGRDDVVFGTTVSGRPAALRGVEQMVGLFVNALPTRATVDAAQTLGDWLRQLHRRHVDAEAYAYTPLHAIPGWSGVAPGEPLFESLVVFENYPARADATRYRERLGVGDVEVVEQTNYPLTVVAIPGERLRLRLHYDRQRVSEASAERIVAMLARLLEQFERGGAALRIGEASLLGAEAGGALVAGWNAAARRADETARQCLHRRFEAQARARPDAVALQCEGEALTYAELDRRANRLAWRLDAAGVRGDTPVALAFGRGVDSIVAILAVLKAGAFYVPLDLDHPPERLAWILEDIGAGALICGEEARERFGDFGGVLIGMGDAAESGEREDAPPPRDTSPADLCYVIYTSGSTGQPKGVCVEHRNVDHLFAATRRSYGIGPSDVWTLFHSYAFDFSVWEIWGALLHGGRLEIVPYRCSRTPEEFLALLEREGVTMLSQTPSAFKQLLRALGDARRPLPAGLRHVFFGGEALIPSQFAACLGEESGVALVNLYGITETTVHVTERVLGAGDALSSRSPVGRPLPGYRIYLLDAAGHPVPPGVPGEIYVGGEGVARGYHKRPELDRERFIADPFLPGERLYRSGDLGRWDADGELDYLGRIDEQVKIRGFRIELGEVEAALARHPDVAAAAVMVDEASIDGHAQLAGFAAPREGASLSPAALRDWLAQRLPPHAIPARLIEVDAIPLTPNGKLDRRWLADALAADGDAARPHVAPRDAVEQALVGVFESVLKRSPVGVTDNFFELGGDSILSIQILSAAHKVGIDFTLDELMRSLTIARLAPRVRRTDSPPPAASAPPPLLDAAYEDAYPLSAMQMAMLANEMRHGQDSAYHNVNDQRLALPFDAAALEAALRGAFERHPALRTAFDLAADEEPLQYVHRQVPLPLAVSDWRGLDAARQDARILDWREAERRRRFDVEHPPLIRFAVHRLSEEEMHIGVTKHHAILDGWSFNLLLSELISDYSARLAGRPLALTAPASRYRDFVEREREAARSDALRDWWRARLQSLPATRLAREPDGDAAPAEVPISAAESAGLEALAARAGASVKSVLLTAHLLALSRICGRPEVTSGVVFNGRSEGADGDRVLGLFLNSLPLGFDFPAGVFDAVALVRAVQAAELEVFSRRRYPLIELHRQVGTVFDALFNFTHFRALEDAVRDIEVSDGYASDTTNVPLVVQSSFDGRQGVLRITLVPSRGHFSTETVVRFVAEYAAALRALLGETTAGDADAGGASRADGGERRSLASAAATPAAAKAPAAARPSGAALRRELSALWTAVLKREPPSEDSDFSALGGDSLLMLRICSRAGRAFGLDAAVVARLLTAQTVAEQARIIETEGADADGVRVGALVALSAPGDAPPLFFAPGAGGHVPYLRALAAELSKDFSVWGMELPGSGEADAGGVEAIATALIADIRRVRPYGPYRLGGHSFGGWVALEIARQLAGQGEAVAWVSIVDSLPPGSAARPHKRDWRDSRWMAEIGNSFARLADAKPLFDADEFDALDDARRVERLRERLIAAGVLPEELGLPEFAARVRAFIAHSLTDYAPATPYAGALHLIVAADRDGEADAPDAAALIDGWRAAAPAAATPLRLPGDHVGIMRPPFVSGLAGALRAVEAAARRVVSDMETEEEQ

SEQ ID NO: 163 - protein, 390 aa, Chromobacterium haemolyticum; identical to SEQ ID NO: 150

SEQ ID NO: 164 - protein, 321 aa, Chromobacterium haemolyticum
MSARIAERAMAALGRPRVGARATRVGGGRASEVFLVQGGDSELIAYWLPEGGAREARRRYALLERLSGQFRLAPRPLAVDEDGDAALLLVEKLDGVAPAACGALGPDTVRRLAENFIETLASLHALEVAPADRPPDYLRRILSEWRRRWNAEEAGAAADADFRAVADWLSERMPQTAPAAWLHNDYKLDNILVDPGDPARLVGVVDWELAAVGHPLADLGAALAYWIEGRDSSLLRLDAPGPSCAPGAPTRAELVDLYAAATGREVTEPAYWYAYGLLRLAVITQQLALRRRDEGQRVPRAKLIVRWLLDRAAEACGGGRL

SEQ ID NO: 165 - protein, 301 aa, Chromobacterium haemolyticum
MNTETSTTVFDVIVIGGSHAGQSAALQIARARRRVLVIDAGARRNRFVAQSHGVIGLDGRSPDAIAADGKAQLLAYPNAQWRADTVVRAESGEAGYALRCASGQSYAARQLVLAFGVVDELPELEGLRERWGESVFHCPYCHGYELKQGRIGVLGGGPLSYLSAMLMPEWGPTVFLSDGGFEPDAAQREALAQRGVDIVRERIARIVERATVELADGRRLAFDGLFMMNRFRLSSPVAEQLGCVIEEGPLGPYVRTDDAMETSAPGVFACGDITQRGGTVALAIGNGALAGIAAHRKLVFG

SEQ ID NO: 166 - protein, 370 aa, Chromobacterium haemolyticum
MCGPTTRWRHRRRAYSPAATSRSGAAPWRWPSATARWRASPRIANWCSDKPRATADFFLFMTGKRFMSWQNLCFSWLLRRTAKSLTRKPGLTAQEMRERSAKWARGEIKPPRGWRVRKLDAEALRGEWIEPEASARREASGRVILYLHGGGYCFCSPLTHRGVAAALAREADARAFSLAYRLAPEHPFPAAVDDALAAYRGLLDEGVAPERIVVAGDSSGGGLALALLLSLRDAGAPMPAGAVLFSPWTDLAATGASLEANDASDVMLSAVAVRNFSRYYLGDAAADHPIASPLYGEYAGLPDLFIQASDSEVLLDDAARVASKASAAGVGVDFKVWRRLPHAWATLTPMLPEARAAIKEAGGFIRKVAP

SEQ ID NO: 167 - protein, 199 aa, Chromobacterium haemolyticum
MHPPGRGRRFHDPLRYRLDQQADEATDAIAPLLDRPYALFGHSMGASLAFEVAQRARGRGLPAPCCLIVSGRAAPHLPPRERPIHGLPDDEFLDEVMRMNGTPAEVLAHPELVQVILPVLHADFEAIETYRPAPRPPLSCRIVALGGSEEEGGVEAAASWQGYATGGFRSEILPGDHFFLNGRPESLFAILKEELGRAV

SEQ ID NO: 168 - protein, 119 aa, Chromobacterium haemolyticum
MRWRGPSIAFSRPTAPVRRAEEHAMNCPSCQVTLLMGERLSVAIDYCPQCRGVWLAPGQLERLLQTQAPAAPAAAYAPSAHGRGHDDEHRRDSRHGGHHGGHHGGHHGGKHGWLRKLLD

SEQ ID NO: 169 - protein, 155 aa, Chromobacterium haemolyticum; identical to SEQ ID NO: 156

SEQ ID NO: 170 - protein, 389 aa, Chromobacterium haemolyticum
MQSTMFSERIERLSGSLIREILAAAQQPQMISFAGGLPAGQCLPQLDFTDMPAGLAQYGASEGEPELRGLIAEQARRMGIACEAEQVLVLSGSQQSIDLCAKLFIDPGTPVVTEGPTYLAALQAFKLFGARVHAVAQRDGRLEPQALAAALSESQARCSYLIPSFQNPAGSCYSAEDRQALAAVIDAAGVPLIEDDPYRALSYDGEAPAPLVSHLKRAPWIYSGSFSKTLAPGLRVGFLIASPELYPYLMRLKQATDLHTNRPAQWFIARQLSDPGHEQRMLALREVYRAGRDAMQDSLQRHFGDLADWQLPRGGLFFWLKLKRTRDTRALLPLALKQNVAFMPGEAFFPEPEQNLGYLRLNFSHASPERIEIGIARLAALLRDTAAAE

SEQ ID NO: 171 - protein, 1695 aa, Chromobacterium haemolyticum
MYSSSDASSRRTSAGDQFGPHPAFSHREALSIARQLMSRAEASPDRLAYASADPAKNVALSYAALCERASAVAARLAQASQAGDRVMLVYQEPLDFIPAFFGCSLAGVIPVPVAPRHGRDTMLAIAKDCGAAIALTAEARDALPGLRWMRTDEAERAAPFLRAADDGSPALLQYTSGSTRTPQGVVVTQSGLCATIDDLDRGAMHDADSVMISWLPYFHDMGLVYGILTPLQCGFPAYLMAPEKFVAQPMSWLRAIDARRGTHTAAPNFAYALCADRAADLAPGTDLSSLRYALNGAEPVRCDTVRRFEAAFAPFGLSPSVVAPGYGLAEATLKVTAGRCGEGTRGVRFGREALARGRVSPQADGVELAACGASLIDTRVRIVDPDTRAPCAPDAVGEIWVAGRTVADSYWRRPEESREIFGARLADGDGAWLRTGDLGFLHDGDLFVTSRLKDLIIVGGRNFYSHDLEDTVSACHPSIRKGRAFAAAVDGEEGEGILIGAEVRGGCGEAEARDILPMIRAALAREHGVAPARIALLRRGSILRTSSGKTRRGATRDALLRGELSIVADDAVGAADDAILAEIARFVPGAAAAPEARLIDLGLDSLSAARLAAAARARHGVELSFAALFALTAEQLRREIAAAPRVDAAAPVAARRYAAGEPFELSEMQQAYWIGQQGGVPLGSVSPHIRVDFEIDAARAPELGRRLARLVARHPSLRMTVGADGRGAFDALAYDPLLPPQDLRGLDAAEAAERLEATRASLAERDGPPLVAAVTRLTDGAAILHMRLSLLAGDLRSFLQLMAELARGASDDPPAQFIAPLTPPAIPDAHREAWLRRVESIAPAPELPMKMGLAEVAEPRFAVRRRELPAALSAALTARAQALGVTLTSLCIAAFADALRLWTAAHAFTLNVTCNTRAEQAGQAIGDYTSNALLSLSESHESFAAFAQAVQRQVWADLDAPWCSGVSILRELSRRNGAPVLMPVVLTSLLSGDPADDLAVLDGIGRVVDMANPTPQVSLHAVLGRRGDRLLVMWEFVAQLFPEGMMDAMFDAFLGALETVASEAAAAERPTVARLAPQQAARRAAVNATAAERAPRRLEAPIVRQARIAPEAVAVRQGETTLSYGALLRDAEDIAGALRQGGVARGDVVAAIVAPGPRAVAALLGIVMAGAVYLPMEPSWPAARIEELLGEAGARLAVVDEGGRALPVPALRLDLPLPRCAWEPAAEAAAGDAAYVIFTSGSTGRPKGVLISHEAAANTIDDINERFAVGPADRALCVSSLAFDLSVYDIFGLLAVGGELVFPERARDPEAMAQALRDGRVTIWNSVPAVLELLLDVAAPRSPDLRLALLSGDWIAPGLAGRLREAFPGLRPISLGGATEVSIWSVVHPIAPEDAVLASIPYGRPLSNQQCFVRAPDGRERPDGVVGELLLGGRGLALAYLGNEAETARRFFVDAEGRRLYRTGDLARWLPDGELELLGRMDGQVKVQGYRIELGEIEAAAMRAGCLARAVASVVRRKDATAIQLHVVARPDYDGDVVAAVRTQLVLHLPAYMQPHHVTVLDALPLTANGKVDRARLAALAAPAPAPAQPAAATRRDASLEATMLAAFAEVVGVEIDPQQGFFDAGATSMHVVRLRALLASRGVAVPPLVDFFSLATIRALAERADAGDADLSPMIDVDGARAYRQRVRARKEAL

SEQ ID NO: 172 - protein, 1556 aa, Chromobacterium haemolyticum
MTYPTPVDAVAIIGASCRLPGVATLEQFWSMIADGRVAIERFGADAARREGVPETVLAQPGFVGVGGPLDGVDQFDAGYFGIPPSQAAAMDPQQRIFLECVHEALERAGHGAARGARVGVWAGSASVDYLVDHVRDRLDRASPNRYLQQWVGVDKDYLAAQVAYRLDFGGPAISLQTACSTSLVAVVQAMQGLLSFQCDFAVAGGVSVALPQRQGHVYEEGSILSADGACRPFTADSSGTVFGNGAGAVVLRRLEDALADGDPIMAVIRGGAVNNDGAAKVGFTAPGGRGQQDVIRQALALSEVDGASIGYVETHGTGTAIGDEVELAALGAALGQRAAADARCALGTLKANVGHLNAAAGVCGLIKAALAVEHGRIPAAVGAERAIDALRGDAGFYLPTETARWDAPQRRAGVSSFGIGGTNAHVIIEAAPPRAPRAADVAPLLLLSARGEALPALCADYADFLDGHPELRVEDVCLTAALGRRHWERRAAFRAESREALIAALRAFAAGEPDAGVIAAETPARAPELSFAFGGAADLDAVLARLELWQASGVVPASVCATGDGVFAAAFAAGALSLADARQRRADRAVAPSRLWVSAASGLPLDSEQAVREELARAGTMVGAADAAAALEAAGAELVLDFGDEALGAGGAGMASLDPASPDALARLWTAGVTLDLAQHYRGGNRVVLPTYPFQRQRHWIDRAPRLLAAGATPFLGRRTDAPALDATFFDAEWSVAALPFLQDHVIYDKVVVSGAALAVMIADGARELTGSDACVLSDLRFPAALVIPPGAARKVQLQLVRDGDGFEATVLTLESADVHATARVDAGEAPGAAPSEPARGEAISAELMDSWLRARSVVMGPTFRRLSDIVVGDGDASCDMRSDADDAGWLLHPGILDSVLQLVAAAARPEGSKAFVPTRIARLALQGRTGAGMRCRASAERGQACLFDAGKVLLEMTGLESREVTRNELLRVEPLREGYAVEWRDAAGGEPAALPESIAILSDAGQAAAGLAAMLRDEGKEAVVVAAVADIPFDKAGLIVDCRGLEARGDAPAPAVYAGALELFATAARRERPCRIAVALAPDAPASAPLQALSRAVAMETPHLQTLALHAGDARAIRRGLDCFERETEVAVRGEAITAPRFDERALPLRADLALSENATWLITGGLGELGLRVAGWLAALGARALVLTGRRPADAAAEAALAALRRDGVEVKVWQADVAVEADVDALLAEIDATLPPLRGVCHLAGVVEDCLVGDVTPASLAATLAGKARGAWLLHERTLAYPLEHFVLFSSAAAAFGAPGQSSYAMANAYLDALAARRREQGLPALSIAWGPWQDVGMLARSSANAKRRLAQLGIGQIEAECGRATFEIALAADLPPHMVLLPIDWGRLIEQWPPHVPASRFAGIASARPGAGSTSSVSELLALAPDERRIRLFQLLAEDAALVTGTPLASLDPERSLFDYDLDSLLITDLRVLLEKRFGRAIPTTVIFSNPTIAALADHLARTVFGAAEAEATAAAPAAETDAPADAASLSQEEIVEMLSAKLDELNRKGAR

SEQ ID NO: 173 - protein, 1183 aa, Chromobacterium haemolyticum
MSQIDTTALMRNALREIQRLQGELDGAEQRRHAPIAVVGMGCRFAGVDSPEALWRSLLDGADGVSEVPAERWDAARYFDADPDASGRIYCRTGSFLDDIASFDAGFFGISAREAAMLDPQQRMLLEVVWEAVERAGMTAAELKGSATGVFAGVMHQDYAHRFRRADDVDLYTASGNAPSVLAGRVSHALGLHGPTLTIDTACSSSLVAVHLACNALRAGECDIAIVGGVNVVLSPLSTAAECRAHMLSPSGRCRSFDDGADGFVRGEGCGVVVLQRFADAEAAGRSIDALIAGSAVNHDGRSAGLTVPNEHAQRELVRAALRAARIDASQVRYVEAHGTGTALGDPIEAAALASVFAGRERGERVLLGSIKSNFGHLEGAAGIAGLIKAALTVRHGVAPATLHVRTPNRGVEWDASPLRLALRAERIDAGDEPCVAGVSSFGFSGTNAHAVLVAPPREAAGASAASAGEGVQLLVVSAKSDASLRGNAARLADHLAGLDASAWAAACHASRVARSHFPHRLALTAADAEEMARELGRFARGEDAAVYRGVCGGMPFGRDATPVEAEAEKEPAERLAALARRYVAGLPLDWPEAAVGRRAARLPTYAFDRQRYWVDEGRAVEESPLYRVAWQPVPAPAGARRSGERIVAGDPALCAEVARALEAAGERCVIAAAEIDAIRRAGDAGLVLAFDRAAGDEDAAAAVARRGALLGALARERAATSSTAPITVVTRGGAAAGPAEDVDPVLAALNAAVRVARREQGRTWRGAIDIDGSQASFDALAALLADDAAEEQLAVRGAVVLAPRLRRAGAGTADALPALDADAVYVVSGGTGALGLATARWLAGRGARHLLLISRGGETGDAAQAACARLRGDGVEVRVVAADIADEAALRGALAAAGRPIRGVAHCAGVVRDATLDALDAAAFAETLRAKVGGAVLLDRLTEAEPLDFFLLYSSISATVGRHGQAAYAAANAYLDAFAQRRSLRARPALSIGWGSWTTGMGAADAKTAERIRAGGLNPLSEGEAFAALEQAFAGEPHRVAAAIDLARIAAQPDLPRLIEGLLGRAPAERARTLSFDQLRGRPAGERRALVADYLDAELRAVLSSPAALPRQASLLDLGVDSLTGAELRNALERALGVSVAITHLIDGSSLDELIDQVMAQLERRLVTEQSSAVGADTEEITL

SEQ ID NO: 174 - protein, 3203 aa, Chromobacterium haemolyticum
MRDSLRLHVLQQAIFRCDMNDNAVSPSRDPHTQAASAETFAALFARSAADHPDAIALRHGARALSYRELDSQANRLAHYLRELGIDRETPVGLCLDRSPEQIIAMLAVFKAGGVYLPLDPDYPRERLAYILNDAMPAALLTRAALTEQLPAHWARVVELDTEQPAWQAQPDHPPLRHDSPDQLAYVIYTSGSTGQPKGVAVTHRGIGALARAQSQRFGIAPGARVLQFASSSFDAAFSEIAMTLLSGACLVTAPAAEVTPGAALADLLARQRISHLTLPPSALALMPDGGIPQDCGLIVAGEACPAAQVRRWSAGRTMLNAYGPTEATVCATMSGRMRDEAPADIGAPLPGVQAYVLDDALRPLPPGVEGELYLAGDGLARGYLGRPALSAERFVANPFGPAGSRLYRSGDLARLRADGALDYLGRADEQLKLRGYRIEPGEIEHLLTQQAGVSQAVVRLREDLPGIKQLVAYVVSRAGLQADGAALRAALAEQLPDYMVPAAVVPLERLPLTPNGKVDKQALPAPDFGDADAGEARDWLEKTLAKLYAEVLGLPRVGLGQGFFDLGGDSISAILLVSRARAHGLQFSPQDVFDQPSIERLALRVRPLEADAAAGELPPPSAADMESIRDRYPAASAVLPLSPLQRGLLFHLLYDEGQSDVYLIQMGFQLDGPLDAARLRAAAEGLLQRHQHLRAAFAADGLEQPAQIVLERVETPWRELDLSAHRADEQQRALERLREDDYAAGVDPARAPLLRFTLIKLDAERHQLLWSFHHLLFDGWSVPVLLRELFALYRGDELPPAIPYRDYLAWLHVRDRDAAKRQWVNHLADLEQPTRLAPGGQKSRQLPRNHNVTADPAVYAMLERLARRQGLTLNTLLQAAWAILLARLSACDDVVFGVTVSGRPPELPGVERMVGLLINTVPLRLRLRPEETLAALLQRLQAQQAALIEHQHLSLAEIQQAAGLGDLFDTLLVFENYPIADDDRRVDDALSIGYLGGQGVDTSHYPLSLCAVPGPELELRFGYRPDLFSADAVDGIARQLLELLRLIAEQPELPLASIAPATPAQQDALAAWNRTDAPLPVATLTQLLERQAELRPDAEALRFDDIALSYRQLHQRANRLARRLRADGVGPETLVAVALPRSIDLVVALLAVLKAGGAYLPLDLDYPAERLAFMLADAQPAVVLSRSELLAGLPVERALCLDQIDAALETLSDAPLELDDNDEHPAYVIYTSGSTGRPKGAVNSHRAIVNRLLWMQHAYPLAADDVVLQKTPSSFDVSVWEFFWPLLAGASLLLARPDGHRDPAYLAELIRRRGVTTLHFVPSMLDAFLLEPASAGCVSLRRVLCSGEALPAPLLARAAQTLPCPLHNLYGPTEAAVDVTAWTCDPARDSRSVPIGHPIWNTQLFVLDSMLRPLPPGIPGELYLGGVGLARGYLRRPGLTAERFVAHPFAVGQRLYRTGDRVVRRDDGALEYLGRLDHQVKLRGLRIELGEIEAALLDQPGVAQAVALIREDAPGQRRLVAYAVPAAGAEADVVRWRDALAARLPDYMVPAAWVALDALPLTPNGKLDRRALPAPELTLAEHREPVTEKEKLLAEAFAQTLGLERVGLDDSFFNLGGDSISSIQLVSLARKRGLSLTPRQVFEQRSVRGLAQVATEAAALAVEPRADAPLLRLEPAEIERLSRRHPGLAELLPLTPLQQGLLFHALYDHSAANPYVVQMRIELDGALDAAALRRAGEGLLRRHPHLLASFIHHDTLQPMQALSRDSAAPWRETDLSALSGDDARARLEDMQTADHGESMPPDRGPLLRFTLIRLAPERHLLLWTFHHLLLDGWSLPVLLEELFALYRQGEAAALPPAPAYRDYLRWLSGRDQTAARQAWSEYLRGVDEPTLVAPGLPAAERRPDLHTAALSTELSAALAAQARRRGLTLNTLAQAAWGLLLARLTGRDDLVFGITVSGRTAPLEDIARLPGLLINTVPLRLKLEPSATLADCLDDLQARQAAMMEHQHLGLGDIQQLTDMEELFDTLMVFENYPQLDALRQNRAGDGLSVRPVDGLGGDVSHYPLGLCVVPGERLELRLGCRADAFPPAAAERLLASLSRLFQALAGDLDLPLSRLRWLDEAESRQLDGWNATARATPSATLPELFRRQAELTPDAVAVCAGDLRLSYHQLDRQSNALAHRLRAAGVAAETPVALWLQRGPLLPVAILGVLKAGGCYVPLHTAQPEERRAWTLAQSRAALLLADEAPAPAMLPPGLPVLRIDDWSDNAEHPPRLALSPDALAYVMYTSGSTGVPKGIAVSHANVRDLALDRRWEGASQSKVLLHSPHAFDAATYELWTPLLHGGQATLAPPGDNDIDSLANTLQGENVTAAFLTTALFNLLVEERPDCFASLRTLWTGGEAASLRAFQRVRERHPQLELVHVYGPTETTTFATCHPLPRDQALTAPLPIGAPMDNTRAYVLDAALRPLPVGAPGELYLAGSGLARGYLDQPALSAERFVANPFGPAGSRLYRSGDRARWRADGQLEFLGRADQQVKLRGFRIELGEIEARLREHPAVSQARAVLRETDGAPRQLLAYVALHPGADVSPSALRQALAAQLPDYMVPAAVVALDALPLTPNGKLDHRALPAPELQAGGDRRPPRSDAERILAGLYAELLGLDGVGLDDGFFDLGGDSIASILLVSRARRQGLLLSPREVFLHPRVEALAAVARPVASVAAEDAAEGPLPATPIIRWWLERGGPQGGFYQSMLLQTPAGLEQAHLTQALQALLDKHDALRMRLDVDGGLSVPPVGSTSAQDCLRRIAADAHLEIPPADIAAAARQLDPAAGAMLRALWLDAGPDAPGRLWLGIHHLAVDGVSWRILLPDLASAWRDVQAGRPIQLDPVATSFRRWALLLNEDAVRAARAAEAPMWANIQSQPDPLLSPCPLDPALDTAGASRRLSVALPAAVTAELLTRVPALFHAGINDVLLTGFTLAVARWRQDQGRSDGTAVRLELEGHGREELGEHCDLSRTVGWFTSLFPVRLDPGVSAAAALDDAAVLGDALKRVKEQLRALPDRGLGYGLLRYLNPETASRLSGAAPAQLGFNYLGRFATPARGDWMPAPEAAGLDGNSDPSVPLSHAIELNAATHDGADGPELVATWLWAGRLFDRQEIARLAEDWFDALRALAKLGHAPDVGGSTPSDHPLAGGLSQEEIDLIEAGL

SEQ ID NO: 175 - protein, 2200 aa, Chromobacterium haemolyticum
MAGQDHVVPGLVAAAVGVGGGPAGIDAGLLAGDGRAGDVPARRRRGRGHGGGGVARVAAVGRGDDGTLVAAGGRGLPDASGGIAGGGAGARLAPMDGRRGMRAGPGRPWPGRAGGRGRVAHRGLVHQPVSVAAAAKRRAVARVEVGEGEDARGAGRRHRLPRAALRRAGGGAGRPCAHGVLQLPGPMASGRGRRAARDMAGRAAGRDALGGDDAALRAGRGGAGARGPAAGGLAVQRGAARAGRGRGAGRGFPRRAGRGAGALPVAAVGRLDAVGPAARPSGPGRYRRSVTATERTVMNQTLSNAAQQARSKVETMLPLTPTQQGLLFHTLKSPDSGVYYEQVACAFHAALDAADYRRALEAVIARHGVLRTGFLWDGPSKPVQVVFRDVELPWVEEDWRQFDPEEQQRRLAAYRDADRRPGFHLSRAPLMRCALFRTGEQRYEFVWSYHHLLLDGWSVQIVLGEALAFYDALRRGAAPALPPPQPYSAFLRWLDEQDGAAAEAFWRARLGDVRSATPLPFADEASPDRAPGHGLIERELDPRTSEGLQRLARECELTQSTVIQAAWALLLARASGRDDVVFGTTVSGRPAGLRGVEQMVGLFVNALPTRASVDAALTLGDWLRQLHRRHVDAEAYAYTPLHAIPAWSGVAPGAPLFESLVVFENYPARADATRYREQLGVSDVEVVEQTNYPLTVVAIPGERLRLRLHFDRQRLTQASAERIVEMLAEVLGQFERGGPALSVARASLLGDEAGRALAARWNAEARHADDAERQCLHRRFEAQARARPDAVALSCDGETLTYAELDRRANRLAWRLDAAGVRGNAPVALAFGRGVDSLVAILAVLKAGACYVPLDLDHPPERLEWILDDIGAVALICGAEAGERFGGFGGARIGMGEAQASGEGEDAPPPRETSPTDLCYVIYTSGSTGQPKGVCVEHRNADHLFASTRRRYGIGPSDVWTLFHSYAFDFSVWEIWGALLHGGRLEIVPYRCSRAPDEFLALLERAGVTMLSQTPSAFKQLLRALDEARRPLPAGLRHVFFGGEATIPSQFAACLRDAGGVALVNLYGITETTVHVTERVLGPGDAQSSRSPVGRPLPGYRVYLLDAAGHPVPPGVPGEIYVGGEGVARGYHNRAELDRERFIADPYLPGARLYRSGDLGRWDARGELDYLGRIDDQVKIRGFRIELGEVEAALARYPDVAAAAVMVDDATLDGHAQLAGFVVAREPARVSGAALRDWLAQRLPPHAIPARLIEMDAIPLTNNGKLDRRRLADALAADGAAARPHVAPRNAVEQALVGVFESVLKRSPVGVTDNFFELGGDSILSIQILSAAHKVDIDFSLEDLMSALTIERLAPRVRQAGSAPAAASAPPPLDPAYEDAYPLSAMQMAMLANEMRHGQDSAYHNVNDQRLALRFDAAALEAALRGAFERHPALRTAFDLAAEEEPLQYVHRRVPLPLAVSDWRGLEPARQDARILDWREAERRRRFDVERPPLIRFAVHRLSEDELHIGVTKHHAILDGWSFNLLLSELISDYSARLAGRPPALAAPASRFREFVEREREAARSDTLRDWWRARLQALPATRLAREPDGDAAPAEVPISAAQSERLQALAASAGASVKSVLLTAHLLALSRIAGAPAVTSGVVFNGRSEGVDGDRALGLFLNSLPLGFDFSAGVGDPAALVRAVQAAELEVFSRRRYPLIELHRQAGTVFDALFNFTHFRALEEAVRDIDVSDGYASDTTNVPLVVQSSFDGRRGVLRISLAPSRGHFSAATVGRFVACYADALRALLGESAPAEPGAEILAENKADGGERRSEASAAATPAAVKPSAASRPRGAALRRELGALWAAVLKRDPPSDDSDFVALGGDSLLMLRICSRAGRAFGLDARVVARLLTAQTVAEQARIIETDGAGEDGARVGALVALSAAGDAPPLFFAPGAGGHAPYLRALAAELPNAFSVWGMTLPGPDDDGAGGVEAIATALIADIRRVQPYGPYRLGGHSFGGWVAFEIARQLAGQGEAVAWVAVVDSLPPSPAAAARREDWTDGRWIAEIGNSFARLADVGLAFAEEEFDALDEARRVERLRERLIEAGAVPEELGLAEFAARVRAFIAHSQTDYAPETPYAGALHLMVAADQDGDAAGGDALIDGWRRAAPAAAAIRLPGDHIGIMRHPFVSGPAAALRAAEAAARRAVSVKETEEEQ

SEQ ID NO: 176 - protein, 390 aa, Chromobacterium haemolyticum
MNTRVKAFSAVEAALAEPEAALANGDFEAVERLMSGVREANRMKGLWLPQVPRADGGLGLSLLELVEVGELLGASPLGHYAVNYQAPDAGNIDVLLEYATPAQRRRWLEPLLRGELRSCFAATEPESAGSNPSSLKTTAVFKEGAWRLSGRKWFASGADGSGFAIVLAVTDEAAPLHARTSTFIVPTDAPGFRRVRNLRVMGDEGCGWASHGELVLDDCRVGEDAMLGKPGEGFVVLQSRLATGRLHHCARWIGVCERAFAIMCRRACRRELAAGELLSSRQTVQNWIAESRASIDAARLLVNQAATRLQNRHERAQIDISIAKFFVAGATQTVLDHALQVQGALGVSGDTILNVLWRHERAGRIYDGPDEVHKSLVARHALAGFRRELA

SEQ ID NO: 177 - protein, 312 aa, Chromobacterium haemolyticum
MAALGRSGAGARATRVGGGRASEVFLVQGGDRELIAYWLPEGGAREARRRFALLERLAGQFRLAPRPLAVDDGEDAALLLVEKLDGVAPAACGQLAPDTVRRLAENFIATLASLHALEVAPADRPPDYLRRILGEWRRRWNAEEAGEALDADFRAAADWLTARLPETEPAAWLHNDYKLDNILVDPGDPARVVGVVDWELAAVGHPLADLGAALAYWIEGRDSSLLRLDAPGPSCAPGAPTRAALVDLYAAAAGREVPSPAYWYAYGLLRLAVITQQLALRRRDEGLRVPRAKLIVRWLLDRAAEACGGGRL

SEQ ID NO: 178 - protein, 301 aa, Chromobacterium haemolyticum
MHSDTSPSFFDVVVIGGSHAGQSAALQIARARRRVLVIDAGARRNRFAAQSHGVIGQDGRSPDAIAADGKAQLLAYPNAQWRADAVVRAQRTDAGFALRCASGQDYGARQLVLAFGVVDELPELEGLSERWGLSVFHCPYCHGYELDRGRIGVLGGDALSYLSAMLMPEWGPTVFLTDDGFEPDEEQREALARRGVEIVRERIARIVDRAAVELVDGRRLEFDGLFTMNRIRLSSPVAEQLGCAIEEGPLGPYVRTDDAMETSTPGVFACGDITHRGGTVALAIGNGALAGIAAHRKLVFA

SEQ ID NO: 179 - protein, 369 aa, Chromobacterium haemolyticum
MCGPTTRWRLRRPACSPAATSRTAAAPWRWPSATARWRASPRIASWCSPETRGGAPSFLFTGNRSMSWQNVCFSWLLRRTAKSLTRKPSLTAEEMRARSAKWARGEVKPPRGWRVRKLDARALRGEWIEPESAARREAAGRVILYLHGGGYCFCSPLTHRGVAAALAVEADARAFSLDYRLAPEHPFPAAVDDALAAYQALLDEGVAPGRIVVAGDSSGGGLALALLLSLRDAGAPLPAGAVLFSPWTDLAATGASLEANDASDVMLSAVAVRSFSRYYLGDAAADHPIASPLYGEYAGLPDLFIQASDSEVLLDDAARVARKASAAGVAVDFKVWRRLPHAWATLAPMLPEARAAIREAGGFVRKVAS

SEQ ID NO: 180 - protein, 511 aa, Chromobacterium haemolyticum
MAGAQAGRAGAARRVDRAGVRRAARGGRPGHPVSARRRLLLLLPADPPRRGRRAGGGGGRARVFARLSAGAGTSLPSRRRRRAGGVSGAVGRGRGARPHRGRRRFVRGRAGARAAAVAARRGRAVAGRRGLVLAVDGSGGDRGVAGGERRVRRDAVGRRGEEFLALLPRRRRGRPSDRLAALRRVRWPARSVHPGQRQRGVAGRRRARGPQGERGRRRGGLQGVAAAAARVGDLGADVAGGASGDQRSRRLRSQGGVVSREWTPAPGGAWVDAAPAGRQAALRLFCFPYAGGGAAVFRGWAERLPAAVDVRPMHPPGRGKRFHDALRYCLDQLADEATDALAPLLERPYALFGHSMGASLAFEVVQRAQARGLPAPACLIVSGRAAPHLPARDKPIHALPDELFLDEVMRMNGTPPEVLEHPELVKLMLPVLRADFEAIESYRPEPRPPLNCRIVALGGSEEEGGAEATASWRGYSTGGFRGEMMPGDHFFLNGRPESLFALLNEELGRVL

SEQ ID NO: 181 - protein, 115 aa, Chromobacterium haemolyticum
MVCNARARPSLRISRTTAPLRRAEEHAMNCPSCQVTLLMGERLSVAIDYCPQCRGVWLAPGQLERLLQTQAPAAPAAASCPPAAHGRGHDDEHRRDGRYGGHHGGKHGWLRKLLD

SEQ ID NO: 182 - protein, 155 aa, Chromobacterium haemolyticum
MADLSPSDDMRAAMEAFFHAYKAFTDKPDEMLAKRGLARVHHRILFFVARYPGLSVKDLLAALGVTKQAINMPLRQLLEMALVQSVAAPHDKRVKQLTLTSEGRRLEEALHREQLKLLQTAFEQTGKPATTGWMQINRSLAAHSRPDDAPSRGKA

SEQ ID NO: 183 - protein, 389 aa, Chromobacterium haemolyticum
MESTMFSERIERLSGSLIREILAAAQQPQMISFAGGLPASQCLPRLDFAEMPAGLAQYGSTEGEPELRELIAEQARRMGMDCSAEQVLVLSGSQQGIDLCAKLFVDPGTPVVTEGPTYLAALQAFKLFGARVHAVGQRDGRLEPQALAAALEQARPRCCYLIPSFQNPAGSCYSAEDRQALAAVIDAAGVPLIEDDPYRALSYDGEAPAPLVSHLKRAPWIYSGSFSKTLAPGLRVGFLIASPELYPYLMRLKQATDLHTNRPAQWFIARQLRDPGYEQRLLGLREVYRAGRDAMQASLQRHFGDLADWQLPRGGLFFWLKLKRTRDTRELLPLALKQNVAFMPGEAFFPEPEQNLGYLRLNFSHASPERIETGIARLAALLRDPAAAD

SEQ ID NO: 184 - protein, 1695 aa, Chromobacterium haemolyticum
MNSSSDVASRRTSAADKFGPHQAFPHREAPSIARQLLWRAEASPDRLAYASADPEKALALSYAALCERASGIAARLAQATEAGERVMLVYQEPLDFLPAFFGCCLAGVIPVPVAPRHGRDTMAAIAQDCGAAIALSAEARDALPGLRWMRTDEAERAAPFLRAAKDASPALLQYTSGSTRTPQGVVVTQTGLWATIDDLDRGAMHDADSAMISWLPYFHDMGLVYGILTPLQCGFPAYLMAPEKFVAQPMSWLRAIAARRGTHTAAPNFAYALCADRAGDLAPGTDLSSLRYALNGAEPVRCDTVRRFEAAFAPFGLRSSVVVPGYGLAEATLKVTAGRCGEGTRGVRFAREALARGRVSPQTDGVELAACGVSLIDTRVRIVDPDTRAPCAPDAVGEIWVTGSTVADSYWGRPEESREIFGARLADGDSAWLRTGDLGFLHEGDLFVTSRLKDLIIVGGRNVYSHDLEDTVSACHPSIRKGRAFAAAVDGEDGEGILIGAEVRGGCGEAEARDILPVIRAALAREHGVAPARIALLWRGSILRTSSGKTRRGATRDALLRGELRIVADDAAEAADDAILAEIARFVPGAAASPDARLIDLGLDSLSAARLAAAARARHGVELSFAALFALSARQLRREIVDAPRLDAAAPAAARRYAAGEAFELSEMQQAYWIGQQGGVPLGSVSPHIRVDFEIDAARAPELGRRLARLVARHPSLRMTVGADGRGAFDALAYDPLLAPQDLRGLDAAEAAERLEATRESLAERDGPPVLAVVSRLTESTAILHLRLSLLAGDLRSFLQLMAELARDAADEAPAQCITPMTPPAATETQREAWLRRVEAIAPAPELPMKMALVEVAEPRFANRRRELPAALSAALTARAQALGVTLTSLCIAAFADTLRLWTAAHAFTLNVTCNTRAEQAGLAIGDYTSNTLLSLSERHPSFAAFAQAVQRQVWADLDAPWCSGVSILRELSRRNGAPVLMPVVLTSLLSGDPADDLALLDGVGRVVDMANPTPQVSLHAVLGRRGDRLVLMWESVAQLFPDGMVDAMFEVFLGALETMATDAAAVERPTLARLAPQQAARRAAVNATAAERAPRRLETPIVRQARIAPEAVAVRQGETTLSYGALLREAEDIAGALRQSGVARGEVVAAIVAPGPRAVAALLGIVMAGAVYLPIEPSWPAARMEELLGEAGARLALLSAAGPALPVPALRLDQPLPRGDAGPAADLEAGDAAYVIFTSGSTGRPKGVLIAHEAAANTIDDINQRFAVGPADRALCVSSLAFDLSVYDIFGLLAVGGEVVFPARSRDPDAMAQALSDGGVTIWNSVPAVLELMLEVSAPRSPHLRLALMSGDWIAPGLAGRLRDAFPALRPISLGGATEVSIWSVVHPIAPEDAVLASIPYGRPLSNQQCFVRAPDGRERPDGVVGELLLGGRGLALAYLGNEAETERRFFIDAEGRRLYRTGDLARWQPDGELELLGRMDGQVKVQGYRIELGEIEAAAMRAGCLARAVASVARRKDATVIQLHVVALPDHQGDVVAAVRTQLVLHLPAYMQPHHVMVLDALPLTANGKVDRARLAELAAPAPAPATPAAAARRDASLEATMLAAFAEVVGVEIDPRQGFFDAGATSMHIVRLRALLASRGVAVPPLVDFFSLATIRALAERADTGEADLSPMMDVDGARAYRQRVRARKEAL

SEQ ID NO: 185 - protein, 1555 aa, Chromobacterium haemolyticum
MTDATPVDAVAIIGASCRLPGVSTLEQFWSMIADGRVAIERFGADAARREGVPETVLAQPGFVGAGGPLDGVDQFDAAYFGIPPSQAAAMDPQQRIFLECVHEALERAGHGAARGARVGVWAGSASVDYLVDHVRDRLDRASPNRYLQQWVGVDKDYLATQVAYRLDFGGPAISLQTACSTSLVAVVQAMQGLLSFQCDFAVAGGVSVALPQRQGHVYEEGSILSADGACRPFTTDSSGTVFGNGAGVVVLRRLEDALADGDPIMAVIRGGAVNNDGAAKVGFTAPGGRGQQDVIRQALALSEVDGASIGYVETHGTGTAIGDEVELAALGAALGQRSAADARCALGTLKANVGHLNAAAGACGLIKAALAVAHGRIPAAVGAERAIDALRGDAGFYLPTETVPWDAPQRRAGVSSFGIGGTNAHVIIEAAPPRAPRTPDVAPLLLLSARGEALPALCADYADFLDGHPELRIEDVCLTAALGRRHWEQRAAFRAESREALIAALRAFAAGEPSAETIAAEVPARAPELSFAFGGAEDLDAVLARVQLWQASGVVPASVCATGSGVFAAAFAAGALSLEDARQRRAERAVAPSLLWVSAASGLPLDSAEAVREELAGAGTAPGAADAAEALEAAGAEWVLDFGDTALGAGAAGMVSLDPASPDALARLWTAGLTLELSQHYRDGNRVALPTYPFQRQRHWIDRAPRFLAAGATPFLGRRTDAPALGATFFDAEWSVAVLPFLQDHVIYDKVVVSGAALAVMMADGARALTGSDGCVLSDLRFPAALVIPSGAARKVQLQLVRDGDGFEATVLTLESADVHATARVDAGEAPGAAPAEPVRGEAISTELMDSWLRARSVVMGPTFRRLSDIVVGDGDASCDMRDDADDAGWLLHPGVLDSVLQLVAAAARPEGSKAFVPTRIARLALHGRTGAGMRCHASAERGQASLFDAGKVLLEMTGLESREVTRNELLRVEPLREGYAVEWRDAAGGDAAALPPSIAILSGAGDTAAGLAAMLRDEGKEAVVVAAVNDIPFDKAGLIVDCRGLEARGDAPAPAVYAGALELFATAARRERPCRIALALAPDAPASAPLQALSRAVAMETPHLQTLALHAGDARAIRRGLDYFERETEVAVKGEAVSAPRFDERALPLRADLALSADATWLITGGLGELGLRVASWLAALGARALVLTGRRPADAAAEAALAALRRDGVEVKVWQADVAAEADVDALLAEIDATMPPLRGVCHLAGVVEDCLVGDVTPASLAATLAGKARGAWLLHERTLAYPLEHFVLFSSAAAAFGAPGQSTYAMANAYLDALAARRRAQGLPALSIAWGPWQDVGMLARSSANAKRRLAQLGIGQIEAECGRATFEIALGADLPAHLVLLPIDWGRLIEQWPPHVPASRFAGIATAQQGAGSTSSVSELLALPAEERRHRLFQLLAEDAALVTGTPLASLDPERSLFDYDLDSLLITDLRVLLEKRFGRAIPTTVIFSNPTIAALADHLARTVFGMAEAEATPAAPAAEPDAPADVAMSQEEIVEMLSAKLKELNRKDAR

SEQ ID NO: 186 - protein, 1181 aa, Chromobacterium haemolyticum
MSQIDTTALMRNALREIERLQRELDGAEQRRHAPIAVVGMGCRFAGVDSPEALWQRLLDGADGVSEVPAERWDVERYFDADPDASGRIYCRTGSFLDDIASFDAGFFGISAREAAMLDPQQRMLLEVSWEAVERAGMTAAELKGSATGVFAGVMHQDYAHRFRRAEEVDLYTASGNAPSVLAGRVSHALGLHGPTLTIDTACSSSLVAVHLACNALRAGECDIAIVGGVNVVLSPLSTAAECRAHMLSPSGRCRSFDDGADGFVRGEGCGVVVLQRLADAEAAGRTIDALIAGSAVNHDGRSAGLTVPNEHAQRELVWAALRAARIDAAQVNYIEAHGTGTALGDPIEAAALASVFAGRGREERVLLGSIKSNFGHLEGAAGIAGLIKAALTVRHGVVPATLHVRTPNRGIDWDTLPLRLAFGAERIDAGGAPCVAGVSSFGFSGTNAHAVLLAPPRAAAGETAAGADEGAQLLVVSAKSDASLRGNAARLAAHLAGLDAAAWAAACHASRAARSHFPHRLALTAVSVEEMARELSRFARGEDASVHSGVCGGMPPSRDASPETADAGREPAERLDALARRYVAGLPVDWPAPASAGRRVARLPSYAFDRQPYWVDEGRAQAESPLYRIAWQPLPAPAGARRSGERIVAGDPALCAEVARALEAAGERCAIAPAEIDAIRHAGSAGLVLAFDRASGGEDAVEAVARRGALLSALARERAATPSAAPITVVTRGGAATGPAEEVDPVLAALSAAVRVARREQGRSWRGTIDIDGSPASFDALAALLADEAAEEQLAVRGATVLAPRLRRAGAGAAGALPALDADAVYVVTGGTGALGLATARWLAGRGARHLLLISRGGEAGAAAQAACARLRGDGVEVRVAAADVADEAALRGALAAAGRPIRGVAHCAGIVRDATLDAAAFAETLRAKVGGAVLLDRLTEAEPLDFFLLYSSISAAVGRHGQAAYAAANGYLDALAQRRRLRARPALSIGWGSWAAGMGAADAKTAERIRAGGLNPLSEGEAFAALERAFTGEPHLVVAAIDLARIAAQPDLPPLIEGLVGRAPAANARTLSFDQLRGRPAGERRARVADYLDAELRAVLSSPAALPRQTSLLDLGVDSLTGAELRNALERALGVSVAISHLIDGSSLDELIDQVMAQLERKLVTEQHSAAGADTEEITL

SEQ ID NO: 187 - protein, 3053 aa, Chromobacterium haemolyticum
MTMARLMTDLADAGVTLHRRGDQLQVQAPQGALDAALVARLREAKEALLSVLDDEGARAAPLAPALPGEAGDAAALSPGQARLVAATRLGDPAMYNEQAAIELADAVDEEAVARAFAALARRHDILRTVFSDGEPELQRVLPEPLVALQAWAVDGDDALRARSAELARQPFAAGAPMWRVDLFSTPERAAVLVLTIHHAIFDRWSMSVLIRDFSAYLASPDAAEPSAPRLSYRDYAAWQRRWMASPDYAAQLDAWTEALAEVDEVPAIRGDRARPPALSGRGGTERFEIPAACMDAAAAFSRGHNTTLFTTLFSAFALLQHRYTGEARGLTLTPAANRPFQAAEDIAGYFVNLVALATEVGEGDSFGALVDRVRDASAQAFARQGVPLDAIVERLRARGGPRHEQLAQTVFAFQNVRLPAVRTASGAAVPFDLDSPFARFDLYLSIEGDERGTFAVWQYNTDLYDAATIRQLGEHYLALLRAALAAPDADARGLPILSEAEEARLRGWGRHERPYRADAAIDALFRECAAAHPGRVALEQGGERWTYAELDQWSDRAAGALRAAGVEAGAVVGVAGERSPRLLAAFLATLKAGAAYLPLDPTYPAARLSAMTADAAPALMIVADGLDAGWLGDYAGPVLSLADCEAGDARPVSSAARRAEDLAYVMYTSGSTGRPKGVAVPHRAVVRLAVGGGYARLDASTVMLQQSPLGFDASTFEIWGCWLNGGRLVLAEPGMPFLDAASRDGVTTMWLTADLFRMVVEEEPAALGGLRELLTGGDALPVASCRAFLEACPGVALINGYGPTENTTFTCSHRVTAGDVKRGSIPIGRPIGNTEVRVVDAGGRLVPVGVPGELWAGGDGLALGYLGRADLTAERFVAAPPPDGGRWYRTGDRVRWRRDGALEFLGRVDEQIKLRGYRIELGEIEATLGHHPGLSGCAVALRRSAADEKQLVGYLVARQDSAEAADAAAVQAWLETRLPGYMVPRAWVWLDALPQSANGKVDRKRLPEPQIEAGAAAAENAVEAALVDIWQGLLGLERVGVRDNFFALGGDSILSIQMASRAAERGLRISPQQVFRYPTIAELAAESGAAEETGAPAEQGEVRGEVRPGPIQAWYLDWPGTDWQQFNQGAYLGLDGAVDAESLIGALQAVAQRHDALRIGWRRDGERWIQESGAGEPVEVKAVDLRGLADAEAALERDAAALQASLRLGGASLWAARLYRLDEGWRLLWLAHHASVDGVSWRILLEDLWRAYAALSRGEAAAWPAKTVSYQAWSQRLWEWAETLPDSTLSYWREMDAPGMTLPGVGAGEDTVAAESRVSLQWDAATTERWLRQAGEAYRMRPEELLLAALARALRQWTGAEECVLDLEGHGRDGLAGVDVSRTVGWFTSLYPLRLPLSGDLPRDLKSVKERMRGVPDSGIAYQALRYGGRGSELGGHARTVCFNYLGQWRLEEGAPGATWLGEPPGGARSGGMRRRYALDVVAQVHEGRLRVDWLYNAALQAADAVTALAERFRAELDAVLAHCLSPQSGGLTPSDLPLAHLEQSDIDAIEHEHPGLEALYGVTPLQQGILFHSIADEDAPLYIEQLHWKMSGVFDAERFRQAWFDVAAAHAALRTTFRWRQLQSPVQIVHPRLDPDWDTLDWRALSAEACASRFDALRELDRQRGFDLERGPLLRGTLIREPGDAWRFLWSYHHAVVDGWSVPLILKQVIGRYAELGAGDAAPLPGSRFLPFVNWLAARDESEQAAYWQQVLAGIEEPTPIGFAAPARGAQARGQGRRAFVFDAGLNEQVDRAARRAGVTRASLLTGAWALTLGYAGGGREVVFGTTLSGRPATLPGVERMVGLFINTVPVRVGIDDDARVSQWLQQLHGQQSERARLGAASLTDIRRWAGYEGGELLSSLFVVENYPVDRQLARGDAGFDVSEFAAAETRTNYPLVGQLIPGEETVLYVDFDASRYDEEGIGRLGASFLHLLAQLAAQPDARLGDLTLVDDDEARRLIHDWNATPPVGDGYLLHAGIERHAELTPLAPAIIGVDEAMNYRELADEMLRVARAVAAAGARREPVAVLLPRSARAVAAYSGVMRAGCAYVPADPAMPPGRLRDLLATVGHVLTTREHLPLLDGVAARAILIDETPPAEVALPEAAPDDLAYVMFTSGSTGKPKGVMISHRAAALTMEVFLRRYEIGASDRLMCVSAAGFDLSVFDFFGAFAAGAAVLLAPESSTIAPAAWLDLMAREGATVWESVPAVMELLLLECRQSGRALPPTLKLAMLSGDRVPVGLPAQIRAAATSNPEVLALGGATEAAIWSCWYDTRGLAADAAFVPYGRHLPGQRLYVLSSSLQAVPVGVPGDLWIAGAGVALGYLGQPDLSAYRFVDNPFVPGERMYRTGDRARVLADGNLEFLGRVDDQVKIGGFRIEIGEIEAALAAAPGVERGVASVVERDGRRIIAGYVLLLPGASLDSAAIRDALARRLPPYMLPASIMALDSVPLSANGKVDRKRLPEPQIEAGAAAAENAVEAALVDIWQGLLGLERVGVRDNFFALGGDSILSIQMASRAAERGLRISPQQVFRYPTIAELAAESGAAEETGAPAEQGEVRGEVRPGPIQAWYLDWPGTDWQQFNQGAYLGLDGAVDAESLIGALQAVAQRHDALRIGWRRDGERWIQESGAGEPVEVKAVDLRGLADAEAALERDAAALQASLRLGGASLWAARLYRLDEGWRLLWLAHHASVDGVSWRILLEDLWRAYAALSRGEAAAWPAKTVSYQAWSQRLWEWAETLPDSTLSYWREMDAPGMTLPGVGAGEDTVAAESRVSLQWDAATTERWLRQAGEAYRMRPEELLLAALARALRQWTGAEECVLDLEGHGRDGLAGVDVSRTVGWFTSLYPLRLPLSGDLPRDLKSVKERMRGVPDSGIAYQALRYGGRGSELGGHARTVCFNYLGQWRLEEGAPGATWLGEPPGGARSGGMRRRYALDVVAQVHEGRLRVDWLYNAALQAADAMTALAERFRAELDAVLAHCLSPQSGGLTPSDLPLAHLDQNDIDEVLQLLNEQP

SEQ ID NO: 188 - protein, 1908 aa, Chromobacterium haemolyticum
MNKTLSNAAQQAGSKVETMLPLTPTQQGLLFHTLKAPESGVYYEQVACAFQVALDAADYRRALEAVIARHGVLRTGFLWDGPSKPVQVVFRDVELPWVEEDWRAFDPEEQRRRLAAYRDADRRPGFHLSRAPLMRCALFRTGEERYEFVWSYHHLLLDGWSVQIVLGEALACYDAYRRGAEPALPPPQSYSAFLRWLDQQDGAAAEAFWRERLGDVRAATPLPLAEEAGPERECGHGLLERELDPWTSEGLQRLARACELTQSTVIQAAWALLLARASGRDDVVFGTTVSGRPAELRGVEQMVGLFVNALPTRATVDAAQTLGDWLRQLHRRHVDAEAYAYTPLHAIPGWSGVAPGAPLFESLVVFENYPARADATRYRERLGVGDVEVVEQTNYPLTVVAIPGERLRLRLHYDRQRVSEAAAERIVAMLARLLEQFERGGAALRIGAASLLGAEAGGALVAGWNAAARRADETARQCLHRRFEAQARARPDAVALQCEGEALTYAELDRRANRLAWRLDAAGVRGDTPVALAFGRGVDSIIAILAVLKAGAFYVPLDLDHPPERLAWILEDIGAGALICGEEARERFGDFGGVLIGMGDAAESGEREDAPPPRDTSPADLCYVIYTSGSTGQPKGVCVEHRNVDHLFAATRRSYGIGPSDVWTLFHSYAFDFSVWEIWGALLHGGRLEIVPYRCSRTPEAFLALLEREGVTMLSQTPSAFKQLLRALGDARRPLPAGLRHVFFGGEALIPSQFAACLGEESGVALVNLYGITETTVHVTERVLGAGDALSSRSPVGRPLPGYRIYLLDAAGHPVPPGVPGEIYVGGEGVARGYHKRPELDRERFIADPFLPGERLYRSGDLGRWDADGELDYLGRIDEQVKIRGFRIELGEVEAALARHPDVAAAAVMVDEASIDGHAQLAGFAAPRKGASLSPAALRDWLTQRLPPHAIPARLIEVDAIPLTPNGKLDRRRLADALAADGDAARPHVAPRDAVEQALVGVFESVLKRSPVGVTDNFFELGGDSILSIQILSAAHKVGIDFTLDELMRSLTIARLAPRVRRTDSPPPAASAPPPPPPPLDAAYEDVYPLSAMQMAMLANEMRHGQDSAYHNVNDQRLALPFDAVALEAALRGAFERHPALRTAFDLAADEEPLQYVHRRVSLPLAVSDWRGLDAARQDARILDWREAERRRRFDVEHPPLIRFAVHRLSEEEMHIGVTKHHAILDGWSFNLLLSELISDYSARLAGRPLALTAPASRYRDFVEREREAARSDALRDWWRARLQSLPATRLAREPDGDAAPAEVPISAAESAGLEALAARAGASVKSVLLTAHLLALSRICGRPAVTSGVVFNGRSEGADGDRVLGLFLNSLPLGFDFPAGVFDAVALVRAVQAAELEVFSRRRYPLIELHRQVGTVFDALFNFTHFRALEDAVRDIEVSDGYASDTTNVPLVVQSSFDGRQGVLRITLVPSRGHFSTETVLRFVAEYAAALRALLGETSAGDAAAGGATRADDGERRSLASAAATPAAAKAPAAVRPSGAALRRELSALWTAVLKREPPSEDSDFSALGGDSLLMLRICTRAGRAFGLDAAVVARLLTAQTVAEQARIIETEGADADGVRVGALVALSAPGDAPPLFFAPGAGGHVPYLRALAAELSKDFSVWGMELPGSGEADAGGVEAIATALIADIRRVRPYGPYRLGGHSFGGWVALEIARQLAGQGEAVAWVSIVDSLPPGPAARPQKRNWRDSRWMAEIGNSFARLADAKPLFDADEFDALDDARRVERLRERLIAAGVLPEELGLPEFAARVRAFIAHSLTDYAPATPYAGALHLIVAADRDGEADAPDAAALIDGWRAAAPAAATALRLPGDHVGIMRPPFVSGLAGALRAMEAAARRAVSDMETEEEQ

SEQ ID NO: 189 - protein, 390 aa, Chromobacterium haemolyticum
MNTRVKAFAAVEAALAEPEAALANGDFETVEQLMSGIRAANRAHGLWLPQVPRADGGLGLNLLELVEVGELLGASPLGHYAVNYQAPDAGNIDVLLEYASPAQRRRWLEPLLRGELRSCFAATEPESAGSNPSSLKTTAVYKDGAWHLNGRKWFASGADGAGFAIVLAVTDEAAPLHARTSTFIVPADAPGFRHVRNLRVMGDEGCGWASHGELVLDDCRVGEDAMLGKPGEGFVVLQARLATGRLHHCARWIGVCERAFAIMCRRACRRELAAGELLSSRQTVQNWIAESRASIDAARLLVTQAATRLQNRHERAQIDISIAKFFVAGVTQTVLDHALQVQGALGVSGDTILNVLWRHERAGRIYDGPDEVHKSLVARHALAGFRRELA

SEQ ID NO: 190 - protein, 558 aa, Chromobacterium haemolyticum
MVRVRRRRRGLRHRAGRHRRGRAAARAHQHLHRARRRARLPPRPQSAGDGGRGLRLGQPRRTGAGRLPGGRGRDAGQARRGLRRAAGQAGHRAATPLRALDRRVRARLRHHVPARLPPGTGGGRAAVLAPDGAELDRREPRVDRRGAPAGDPGGHAAAKPPRARADRHLDREVLRGRRDADRARPRVAGAGRVGRQRRHDSQCAVAARTRGADLRRPGRSAQEPGGAPCAGRLPAGAGVSARIAERAMAALGRPRVGARATRVGGGRASEVFLVQGGDSELIAYWLPEGGAREARRRYALLERLSGQFRLAPRPLAVDEDGDAALLLVEKLDGVAPAACGALGPDTVRRLAENFIETLASLHALEVAPADRPPDYLRRILSEWRRRWNAEEAGAAADADFRAVADWLSERMPQTAPSAWLHNDYKLDNILVDPGDPARLVGVVDWELAAVGHPLADLGAALAYWIEGRDSSLLRLDAPGPSCAPGAPTRAALVDLYAAAGREVTEPAYWYAYGLLRLAVITQQLALRRRDEGQRVPRAKLIVRWLLDRAAEACGGGRL

SEQ ID NO: 191 - protein, 301 aa, Chromobacterium haemolyticum
MNTETSTTPFDVIVIGGSHAGQSAALQIARARRRVLVIDAGARRNRFAAQSHGVIGLDGRSPDAIAADGKAQLLAYPNAQWRADTVVRAESGEAGYALRCASGQSYAARQLVLAFGVVDELPELEGLRERWGESVFHCPYCHGYELKQGRIGVLGGGPLSYLSAMLMPEWGPTVFLSDGGFEPDAAQREALAQRGVDIVRERIARIVERATVELADGRRLAFDGLFMMNRFRLSSPVAEQLGCVIEEGPLGPYVRTDDAMETSAPGVFACGDITQRGGTVALAIGNGALAGIAAHRKLVFG

SEQ ID NO: 192 - protein, 304 aa, Chromobacterium haemolyticum
MSWQNLCFSWLLRRTAKSLTRKPGLTAQEMRERSAKWARGEIKPPRGWRVRKLDAEALRGEWIEPEAAARREASGRVILYLHGGGYCFCSPLTHRGVAAALAREADARAFSLAYRLAPEHPFPAAVDDALAAYRELLDEGVAPERIVVAGDSSGGGLALALLLSLRDAGAPMPAGAVLFSPWTDLAATGASLEANDASDVMLSAVAVRNFSRYYLGDAAADHPIASPLYGEYAGLPDLFIQASDSEVLLDDAARVASKASAAGVGVDFKVWRRLPHAWATLTPMLPEARAAIKEAGGFIRKVAP

SEQ ID NO: 193 - protein, 249 aa, Chromobacterium haemolyticum
MNRGWVDAAPAGQAAALRLFCFPYAGGSATVFRGWAERLPATVDLRPMHPPGRGRRFHDPLRYRLDQLADEATDAIAPLLDRPYALFGHSMGASLAFEVAQRARARGLPAPCCLIVSGRAAPHLPARRRPIHALPDDEFIDEVLRMNGTPPEVLQHPELVNIVLPVLHADFEAIETYRPAPRPPLSCRIVALGGSEEEGGVEAAASWQGYATGGFRSEILPGDHFFLNGRAERLFAILREELERGAGAA

SEQ ID NO: 194 - protein, 89 aa, Chromobacterium haemolyticum
MNCPTCQVTLLMGERLSVAIDYCPQCRGVWLAPGQLERLLQTQAPTLPAAPQAAAGCAPAAPAHGHGESHRSGGRHGGKHGGWLRKLLD

SEQ ID NO: 195 - protein, 155 aa, Chromobacterium haemolyticum
MADLSAPDDMRAAMEAFFHAYKAFTDKPDEMLAKRGLARVHHRILFFVARYPGLSVKDLLGALGVTKQAINMPLRQLLEMDLVQSVAAHHDKRVKQLSLTTEGRKLEETLHREQLKLLQTAFDLTGKPATAGWMAVNHSLAAHTRLGAQEPQDKA

SEQ ID NO: 196 - protein, 389 aa, Chromobacterium haemolyticum
MQSTMFSERIERLSGSLIREILAAAQQPQMISFAGGLPAGQCLPQLDFADMPAGLAQYGASEGEPELRELIAEQARRMGIACEAEQVLVLSGSQQSIDLCAKLFVDPGTPVLTEGPTYLAALQAFKLFGARIHAVVQQDGRLPPQALAAALEQARPRCCYLIPSFQNPAGSCYSAEDRQALAAAIDAAGVPLIEDDPYRALSYDGDAPAPLVSHLKTAPWIYSGSFSKTLAPGLRIGFLIASPDLFPYLMRLKQATDLHSNRPAQWFIARQLRDPGHEQRLLGLREVYRAGRDAMQASLQRHFSDLADWQLPQGGLFFWLKLKQPRDTRQVLPLALQQNVAFMPGEAFFPDPERNLGYLRLNFSHASPERIETGIARLAALLREQAAIA

SEQ ID NO: 197 - protein, 1715 aa, Chromobacterium haemolyticum
MGARPVFPEPLSIHGGQAMYSSSEVASRRKSAADKFGVHHAFPHREALSIARQLLWRAEASPDRLAYASADPVKNVALSYAALCERASGIAARLAQATETGDRVMLVYQEPLDFLPAFFGCCLAGVIPVPVAPRHSRDMMLAIAEDCGAAIALTAEARDALPGLRWMRTDETEGAAPFLRAADEGSPVLLQYTSGSTRTPQGVVVTQTGLWATIDDLDRGAMHDADSVMISWLPYFHDMGLVYGILTPLQCGFPAYLMAPEKFVAQPMSWLRAIEARRGTHTAAPNFAYALCADRAADLAPGTDLSSLRYALNGAEPVRCDTVRRFEAAFAPFGLKPSVVAPGYGLAEATLKVTAGRCGEGTRGVRFGRDALARGRVSPEADGVELAACGSSLIDTRVRIVDPETREPCAADVVGEIWVAGSTVADSYWRRPEESREIFGARLADDDGAWLRTGDLGFLYDGDLFVTSRLKDLIIVGGRNFYSHDLEDTVSACHPSIRMGRVFAAAVDGEEGEGVLIGAEVRSGCEEADAREILSVIRAALAREHGVAPARVALLRRGSILRTSSGKTRRSATRDALLRGELSIVADDAADASDDAILAEISSFVPGAAAAPDARLIDLGLDSLSAARLAAMARARHGVELSFATLFALSAEQLRREIAAAGVRLAEIVAPVSVRGYAAGEPFELSEMQQAYWIGQQGGVPLGSVSPHIRVDFEIDAARAPELGRRLASLVARHPSLRMTVDADGRGVFDALAYDPLLPPQDLRGLDAAEAAERLDATRASLAERDGPPVVAAVTRLTDSTAILHMRLSLLAGDLRSFLQLMAELARGAAGDAPAQLITPMTPAAPTGEQREAWLRRVEAIAPAPELPMKMALADVAEPRFADRRRELPAALSAALAARALGLGVTLTSLCIAAFADTLRLWTAAHAFTLNVTCNTRAEQAGQAIGDYTSNALLSLSERHESFAAFAQEVQRQVWADLDAPWCSGVSILRELSRRNGAPVLMPVVLTSLLSGDPADDLAILDGIGRVVDMANPTPQVSLHAVLGRRGDRLLVMWEFVAKLFPEGMIDAMFDAFLGALEMMATEAAALERPTVARLAPQQAARRAAVNATEAERAPRRLETPIVRQARTAPEAVAVRQGEATLSYGELLRQAEDIAGALRQSGVARGDVVAAIVAPGPRAVAALLGIVMAGAVYLPIEPSWPAARIEELLSEAGARHAVVSEGGLTLPVQALRLDLPLPRGDAGPAQDLEAGDAAYVIFTSGSTGRPKGVLIAHEAAANTIDDINERFAVGPADRALCVSSLAFDLSVYDIFGLLAVGGEVVFPERARDPDAMAQALRDGGVTIWNSVPAVLELLLDVAAPRSPDLRLALLSGDWIAPGLAGRLRDAFPALRPISLGGATEVSIWSVVHPISPEDATLASIPYGRPLSNQQCFVRAPDGRERPDGVVGELLLGGRGLALAYLGNEAETERRFFIDAEGRRLYRTGDLARWQPNGELELLGRMDGQVKVQGYRIELGEIEAAAMRAACLTRAVASVVRRNNATAIQLHVVAQPDYDGDVVAAVRAKLVLHLPAYMQPHHVTVLDALPLTANGKVDRARLAALAAPAPAPAKPAAAARRDDSLEATMLAAFAEVVGVEIDPQQGFFDAGATSMHVVRLRALLASRGVAVPPLVDFFSLATIRALAERADSGDADLSPMIDVDGARAYRQRVRARKEAL

SEQ ID NO: 198 - protein, 1553 aa, Chromobacterium haemolyticum
MTHSTPVDAVAIIGASCRLPGVSTLEQFWSMIADGQVAIERFGADAARREGVPETVLAQPGFVGAGGPLDGVDQFDAAYFGIPPSQAAAMDPQQRIFLECVHEALERAGHGAARGARVGVWAGSASVDYLVDHVRDRLDRASPNRYLQQWVGVDKDYLATQVAYRLDFGGPAISLQTACSTSLVAVVQAMQGLLSFQCDFAVAGGVSVALPQRQGYVYEEGSILSADGACRPFTTDSSGTVFGNGAGVVVLRRLEDALADGDPIMAVIRGGAVNNDGAAKVGFTAPGGRGQQEVIRQALAFSEVDGASIGYVETHGTGTAIGDEVELAALGAALGERSGARCALGTLKANVGHLNAAAGACGLIKAALAVEHGRIPAAVGAERAIDALRGDAAFYLPTETARWDAPQRRAGVSSFGIGGTNAHVIIEAAPPRAPRTADVAPLLLLSARGEALPALCADYADFLEDHPELRIEDVCLTAALGRRHWEKRAAFRAESREALIRALRAFAAGEPDAGVIAAETPARAPEVSFAFGGAGDLDAVLARVRLWQASGVVPASVCATGSGVFAAAFAAGALSLDDARQRRAERAVAPSLLWVSAASGLPLDSEEAVREELARAGMALSADAAAEALEAAGAERVLDFGDTALGTGAGMASLDPASPDSLARLWTAGVALDLVQHYRDGNRVALPTYPFQRQRHWIDRAPRFLAAGATPFLGRRTDAPALDATFFDAEWSVAVLPFLQDHVIYDKVVVSGAALAVMIADGARELTGSDACVLSDLRFPAALVIPPDAARKVQLQLVRDGDGFEATVLTLESADVHATARVDTGEAPGVAPSEPVRGEAISSDLMDTWLRARSVVMGPTFRRLSDIVVGDGDASCDMRADADDAGWLLHPGILDSVLQLVAAAARPEGSKAFVPTRIARLALQGRTGAGMRCHASAERGQASLFDAGKVLLEMTGLESREVTRNELLRVEPLREGYAVEWRDAAGGEAAELPASIAILSDAGQTAAGLAAMLRDEGKEAVLVAAVKDIPFDKAGLIVDCRGLEARGDAPAPAVYAGALELFATVARRERPCRIAVALAPDAPASAPLQALSRAVAMETPHLQTLALHAGDARGIRRGLDCFDRETEVAVRGDAVTAPRFDERALPLRADLALSADATWLITGGLGELGLRVASWLAALGARALVLTGRRPADAAAESTLSALRRDGVEVKVWQADVAVEADVDALLAEIDATMPPLRGICHLAGVVEDCLVGDVTPASLAATLAGKARGAWLLHERTLAYPLEHFVLFSSAAAAFGAPGQSTYAMANAYLDALAARRREQGLPALSIAWGPWQDVGMLARSSANAKRRLAQLGIGQIEAECGRATFEIALGADLPAHLVLLPIDWGRLIEQWPPHVPASRFAGIATAQPGAGSTSSVSELLALPADERRHRLFQLLAEDAALVTGTPLASLDPERSLFDYDLDSLLITDLRVLLEKRFGRAIPTTVIFSNPTIAALADHLARTVFGMAESEATAAAPAAEIDAPTDAAPLSQEEIVEMLSAKLNELNRKGAR

SEQ ID NO: 199 - protein, 1182 aa, Chromobacterium haemolyticum
MSQIDTTMLMRNALREIERLQRELDGAELRRHAPIAVVGMGCRFAGVDSPEALWRRLLDGEDGVSEVPAQRWDAERYFDADPDAKGRIYCRTGSFLDDIASFDAGFFGISAREAAMLDPQQRMLLEVTWEAVERAGMTAAELKGSATGVFAGVMHQDYAHRFRRADDVDLYTASGNAPSVLAGRVSHALGLHGPTLTIDTACSSSLVAVHLACNALRAGECDIAIVGGVNVVLSPLSTAAECRAHMLSPSGRCRSFDDGADGFVRGEGCGVVVLQRQADAEAAGRTIDALIAGSAVNHDGRSAGLTVPNEHAQRELVRAALRAARIDASQVNYVEAHGTGTALGDPIEAAALASVFAGRDRADRVLLGSIKSNFGHLEGAAGIAGLIKAALTVRHGVAPATLHVRTPNRDIEWDTLPLRLALGAERIDGGDAPCVAGVSSFGFSGTNAHAVLVAPPRVAGETAASVDEGAQLLVVSAKSDVSLRGNAARLAAHLAGLDASAWAAACHASRVARSHFPHRLALTAATAEEMARELGRFARGETAAVHSGVCGGMPFGRDAAAPETDAGGDPAERLDALARRYVAGLPVDWPAPAGAGRRVSRLPTYAFDRQSYWVDEGPATEESPLYRIAWQPVEAPAGARRSGERIVAGDPALCADVARALEAAGERCVIAAAEIDAIRRAGSAGLVLAFDRASGSEDAVEAVARRGALLSALARERAVTSSASIAVVTRGGAATGPAEDVDPVLAALSAAVRVARREQGRAWRGTIDIDGSPASFNTLAALLADEAVEEQLAVRGATVLAPRLRRAGVGAATALPALDADAAYVVTGGTGALGLATARWLARRGARHLLLISRGGETGDAARAACASLRDDGVEVRVAAADVADEAALRGALAMAGRPIRGVAHCAGIVRDATLDALDAAAFAATLSAKAGGAVLLDRLTEGEPLDFFLLYSSISAAVGRHGQAAYAAANGYLDALAQRRRLRARPALSIGWGSWAAGMGAADAKTAERIRAGGLNPLSEGEAFAALEQAFSGEPHLVAASIDLGRIAAQPDLPRLIEDLVGRAPAASARTLSFDQLRGRPAGERRALVADYLEAELRAVLSSPAALPRQSSLLDLGVDSLTGAELRNELERALGVSVAITHLIDGSSLDELIDQVMAQLERKLVTEQHSAVGADTEEITL

SEQ ID NO: 200 - protein, 3423 aa, Chromobacterium haemolyticum
MTMARLMTDLADAGVTLRRRGDQLKIQAPQGALDEALVARLREAKAELLRVLDDEDARAAPLAPAPAQPGEAGDAAALSPGQARLVAATRLGDPAMYNEQAAIELADAVDAEAVARAFATLARRHDILRTVFSDGEPGRQTVLPEPIVALQAWTVDGDDALRARAADLARLPFVAGAPMWRVDLFSTPERAAVLVLTIHHAIFDRWSMSVLIRDFSAYLASPDAAEASASGLSYRDYSAWQRRWMASADYAAQLDAWVDDLAEVDEVPAIRGDRARPPAMSGRGGTERFEIPAACMDAAAAFSRSRNTTLFTTLFSAFALLQHRYTGEARALTLTPAANRPFQAAEEIAGYFVNLVALATEVGEGDSFGALVDRARDASARAFARQGVPLDAIVERLRARGGPRHEQFAQTVFAFQNVRLPAVRTASGAAVPFDLDSPFARFDLYLSIEGDERGTFAVWQYNTDLYEAATIRQLGEHYLALLRAALASPDANARALPILSAEEEARLRGWGRHELPYRADVSIDRLFRERAADHPGRVALEQGGVRWTYAELDQWSDRAAGALRAAGVEAGAVVGVAGERSPRLLAAFLAVLKAGAAYLPLDPTYPAARLRAMTADAAPALMIVADGLDAGWLGDYAGQVLSLADCEAGAARPLLSEARRAEAEGLAYVMYTSGSTGQPKGVAVPHRAVARLATGGGYARLDATTVMLQQSPLGFDASTFEIWGCWLNGGRLVVAEPGMPFLDAASRDGVTTMWLTADLFRMAVEEEPAALGGLRELLTGGDALPVASCRAFLEACPGVALINGYGPTENTTFTCSHRVTAGDARRGSIPIGRPIGNTEVRVVDAGGRLVPVGVPGELWAGGDGLALGYLGRADLTAERFVAAPPPDGGRWYCTGDRVRWRRDGVLEFLGRIDEQIKLRGYRIELGEIEATLGHHPGLSGCAVALRRSAADEKQLVGYLVARPDSGEAADSAAVQAWLEARLPAYMVPRAWVWLDALPQSANGKVDRKRLPEPVVETGTAAAETEAEAALVDIWQGLLGLERVGVRDNFFALGGDSILSIQMASRAAERGLRLSPQQVFRYPTIAELAAEGCAAEDAGAQAEQGEVVGEVRPGPIQAWYLDWPGTDWEQFNQGAYLGLGGSVDAEALIGALQAVAQRHDALRIGWRRDGERWIQESGAGEPVEVKAVDLRGLADAEAALERDAAALQAGLRLDGASLWAARLYRLDEGWRLLWLAHHASVDGVSWRILLEDLWRAYAALSRGEAATWPAKTVSYQAWSQRLWEWAEALPESTLRYWREMDAPGMPLPGFNGAEETVAAESRVSLQWDAETTERWLRQAGEAYRMRPEELLMTALARALRQWTGAEECVLDLEGHGRDGLAGVDVSRTVGWFTSLYPLRLPLSGDLPRDLKLVKERMRSVPDGGMAYHALRYGGRGSELGGHARTVCFNYLGQWRLEEGGEPRSTWLGEPPGGTRGAGMRRRYGLDVVAQVHEGRLRVDWLYSASRQREGAITALADGFRAELDAVLAHCQSPESGGLTPSDLPLAHLDQSEIDAIEREHPRLEALYGLTPLQQGILFHSIADDGAPLYVEQLHWKMSGAFDAERFRQAWFDVAAAHAALRTTFRWRGLKSAVQIVHPRLDPDWDTLDWGALSVEACVSRFDALRELDRERGFDLERGPLLRGTLIREPDDAWRFLWSYHHAVVDGWSVPLILKQVIGRYAELGVGEAAPLPGSRFLPFVNWLAARDESEQAAYWKQVLEGIEEPTPIGFASPARGPQAQGQGRRTFVFDAALREQLDRAARRAGVTRASLLTGAWALTLGYAGGGRDVVFGTTLSGRPATLPGVERMVGLFINTVPVRVGMDDDASVSEWLRQLHEQQSERARLGAASLTDIQRWAGYEGGELLSSLFVVENYPVDRTLARGDAGLDVSEFAAAETRTNYPLVGQLIPGEETVLYVDFDASRYDEESIGRLGASFMHLLSQLAAQPDARLGDLTLVDDDEARRLIHDWNATPPVGEGYLLHAGIERHAVLTPLAPAIIGVDEAMNYRELANETLRTARAVAAAGAKREPVAVLLPRSARAVAAYSGVMRAGCAYVPAEPAMPPGRLRDLLATVGYVLTTREHLPMLDGVAARAILIDETPPADVALPDAAPDDLAYVMFTSGSTGKPKGVMISHRAASLTIEVFLRRYEIGASDRLMCVSAAGFDLSVFDFFGAFAAGAAVLLAPESSTIAPAVWLELMTREGATVWESVPAVMELLLLECRQSGRALPPSLKLAMLSGDRVPVGLPAQIRAAATSDPEVLALGGATEAAIWSCWYDTRELASDAAFVPYGRHLPGQRLYVLSSSLQAVPGGVPGDLWIAGAGVALGYLGQPDLTAYRFVDNPFVPGERMYRTGDRACVLADGNLEFLGRVDDQVKIGGFRIEIGEIEAALAVAPGVERGVASVVERGGRRIIAGYVLLLPGASLDLAAVRDALARRLPPYMLPASIMALDSLPLSANGKVDRKRLPDPVVETGAAAAETEAEAALVEIWQGLLGLERVGVRDNFFELGGHSLMIVSLIERLRTLGWRLEVRTVFTSPVLAEMAQAISAQPNDFPTFTAPPNRIPVGSTVITPDMLPLVSLSQTEINAIVDTVLGGAANVQDIYPLSPLQEGILFHHLLQTEGDAYLLRSVIAFDSRARLDNFLAALQQVINRHDILRTTACWQGLAQPVQVVWREALLSIETFVPTDEDDVLARLLAHTDPRQRRLDLNRAPLLAIGVAHDQTQDEWLLALSFHHLIADHLTLERIVREITVILHGGAETLTAALPYRNFIAQTLSVPTEVHETYFREVLADVDEPTVPFGILNVQRDGADVSESGLLLEVTLAQAIRTQARRLGVSPGVLFHVGWAQVLAQTSGRDDVVFGSVLQGRLQGSAGADHAMGMFINTLPVRVSLAARSVQEVVQATYHGLMGLLEHEQAPLALAQRCSGVEPPLPLFSALLNYRHSVAGEAEAVWEGMRLLSSEERTNYPLTVSVDDLGEGFNLTAQTVAGVDSHRLAAYLATAMEGLVEALATDPQQAILNLPILPAAERQQLLVDFNATEAEFPQDALIHQLFEEQVRRTPEATAVVFEAQSLSYGELNRRANQLAHHLIGLGVRPDDRVAICVERSLEMVVGLLGILKSGGAYVPLDPSYPAERLAYMLDDAAPVAVLTQRHLLDTLGAACPVVLLDTRNPYLEAQPGDNLDAEALGLTSRHLAYVIYTSGSTGLPKGVMVEHRSLSNLIATQRDTLAIQSNSHVLQFSSNSFDACIWECCMALQGGASLHIAQRTNLLPGTTLLSSLESSAITHALLSPTVLAALESIPATLKTLIVGGEACPPSLVQRWAKNRQMINAYGPTESTVCATLYRCDAEEGGAPSIGRPIANTQIYILDPHGQPVPLGVAGE

SEQ ID NO: 201 - protein, 3640 aa, Chromobacterium haemolyticum
MNMTSTPNLKDQIQDILPLSPLQRGVLFHTLFAPGSPVYFEQLICRLDGAVDPAAMADALERLAERHPILRTAFVTKGQAEPRQVVFRHARTPLDVHDWSRDDPAERQRRLEALLDEDRRRGFQLNRPPLMRLTLLRYGQEEWRLIWSHHHILLDGWSLPILMRDYFSLLSGAALPSAPPPFAAYLSWLGRQDQDNAAKRWRAALGDLAAPTPLGLDRPALPGALAGADVGQIEMRLDYRADGDLAAAAERCRVSPGSLLLGAWAILLSRYSRQDDVVFGLTLSGRAIDLPGVDGMVGLLINSLPLRLPVPADAALPQWLAEVQRRQLALQSLSHSDLAEVQRHSGVPRGQPLFETLVAIDNFPIGEALPSDGLGFRISDVSQRERTHYPLTLTLVPGADGLSLKLGFDRARVDDAPAAALAEGYLELLRQIAARPDAALRELGLVRPSPAKPSVPGPRGGPDTLAAAFLAAAERFPDRIAVSDGPATLSYRQLRAQAAAIAERLRQDGVQPGVTVGICLPRSAGQIVAMLGVTLAGGVYLPLDPDYPAERLAYQLADSQALLTLTDAELRPRLPAEHRCLSLAEIGCGARPAARPPAGLEAGHGAYVIYTSGSTGQPKGVLVSHRNVLRLFSASARHFAFDESDVWSYFHSFAFDFSVWEIWGALLHGGRCVVVPRELSRDPAAFVELLGREGVTVLNQTPSAFKLAIAAEAAAPLPRPSALRWVIFGGEALRLAELSPWLERHGDDSPRLANMYGITETTVHVTFRRIRAADLKAGGELSPIGEPLDDLSLELADPCGHPVPLGAPGEILVGGAGVSLGYLNRPQLNAERFPGVGAERLYRSGDLARRTADGELLYCGRIDHQVKIRGFRIELGEVRAALLSHPAVRDVHLVAADNQLIAYLLADDPAAAGAETLRRHLAACLPAHMIPAVFIALAEFPLTLNGKVDARALPSPQGARSALDTPYVEAATPRQKLLAEIWRQVLDLPRVGIRDNYFTLGGDSIRSVRIAGLAKERGCPLNIQDIFRHGTIAAIVEAIGEAESTAAPDAALPPFALIDAADRARLPPEVEDALPLARLQAGMLFHNEYDDGRNLYHDVFSHRLRADIDPERLRRALAELSREHPLLRTGFALAGYSQPLQLVWRELTPSLDIDDLRGLSPQQRDDAVASQLRQLSEQRFAPERPPLLRVGCLRLADDEWQLTLAFHHAILDGWSVATLCAALFKRMRDQGGPAPAPRAAFREFVAAERAALADPAQRDYWRAQLNGLPSAAIPRWPQRVAPTGKARVGSRETRLPSAAAAALIRQAADSGMPLKTLLLAVHARVLACLCGQNEIVTGLVSNGRPADADGAEALGLFLNTLPLRVRVGGSWRALLAETMAAEGNSLPRRFFPLAEILKLDEAARFDASFNYVDFHVYRELSESGGLEVLDSSRQEAVDIPLAVTFSASRAEGAVTLGFSYDRAAFPDEQVAAIGRLYLAAAAALARDPDALCLDVPLTETAVEPLRGPSAGLAAFSVPQTVAAIARRQPDAPAVAGNGEALSYARLDGQANRLARRLLAHGLGPDAVVALDLPRSPELVVAMLATLKAGAAYLPLDRGQPEARRRDILQEAAPALLLSLDPAAYAPPGCAVLQANLAEDLNDEDAAAPAAPAHGDALAYLLFTSGSSGRPKGVAVGRAALGNHMAWMNRRYPLDADDAVLQKTPVGFDASVWEFWAPLTQGARLLLAAEDGHRDPDYLIRAVREQGVTVLQLVPSLLAVLLSTPDFAGCRTLRRVFVGGEALPAATQARFHAALDIPLVNLYGPTETAIDASSAEYLRTDPPAAAIGIGHPIDGAVFHVLDTRLNPVPPGVRGELYIAGCGLARGYLGQPAQTARRFLPDPLSPLPGGRMYRSGDIVRLLPDGVLEYLGRADGQVKLRGQRVELEEIEAGLAACPGVRQAAAALYRDRSGADKLAGYVGLTPEAEAGDWRAAILAALRLRLPEYMLPAQLIALRQWPVGANGKTDRAALPAPQTDATAPRPSRAPNTPEEQALAAIWRQTLDREDIGADDNFFQLGGDSILGLQIVAQARQAGLTLAARDIFSHPTIAELAAQARPARQEAKLEDIPPGAPLPLTPAQGWFFERVDSLPRPGHWNQALLLSVAAGISAPTLRSALLRLEQSHDAFRLRFAAGAEGWRQHYAPREALREEDWLERVDLSALPAADRAAAIEARAEAAQRELDLERGPLLRAVHFDCGDGEAGRLLLLIHHLIVDGVSWRVLLQDLAGLLAGVAPMPANVGFGHWALRPFEPSAEERAYWLDQARLAADAVRVPLTAEAERDNRYGMTDTVELSLDGGETAALLRGGALRASAEEMLLTAALGALRDWLDADALVLTMEGHGRDDEALDLSRTVGWFTAMYPLTVTGLAEASPPRLLRRVKQALRAVPAGGAGYGALRQAADARALAAMPEPQIAFNYLGQFDASLPADGALAPAPESVGAMEDPDGLRPRLIDIVALVSDGKLSLRWNYGRATLPRATVEALARQMRQRLLALLSLDADAAAAALTPDDFPLAALDEAGLPAALGQRGDIVDLWSLTPVQEGMLFHSRMEASSGLAGVYIEQVVAELDGAVDPALLRQAWEQVLARHDALRVSFAWEGLAAPLQRVHRAPALPFSVSETPDETALERYLADDRAAGFALDAPPLMRLALLTRNGAPWRLVWTHHHALLDGWSMAVVFDEALALYRGLSQGQSAALPPAPSFGRFIKWLRTHSDRQAQKEFWRDYFSGYAAAADLALLPAGGPPQPRAHSLRLDSALTAELRRTARERKVTLNTLFQGALAVALSRVGRCDDLVFGVTMAGRPESLPGCDAAVGLFISTLPLRADCSAAQAVDDFLHRLQHAQSRLGPFESSALVDIQRWSGLSARQALFDVVLVYENYPIRASVGDAAQALRVGAASAREQSNYPLTLYVKPDADAIELDGVFDAGRIEAERVAALLEALPRLLRQIAGGATRVGDLRLAEPTPPAAFPPPERGDNVLAMLTAAARLNPDKIAVAAEDGELSYRQLVNGARALARRLAERGVAPGDTVALALPPDGRALTALLGTLWAGAQYLPLDPALPPLRRDAILEDARPGLVLVDGEQTGWPASAKLLTLPTPLPQADGDDAPLPGDALHPEGPAYTLFTSGSTGRPKGVQIVHRSLANILRHFSAEPGFGADDVLLSVTTWSFDIAALELLLPLVRGGTVAIAPASASGDGPALAAEAARRGAGVIQATPASWRMLLEAGWKPAPGLRAWCGGEALPADLARELLDAGAALWNVYGPTETTIWSALHRVDSAELPPPAGHAVRRTTLWVADHHGQPLPPQLAGELQIGGDGLALGYLGAPAQTAARFRPDPLAGRPGARVYRSGDLACLRLDGSVRVLGRLDGQTKLNGFRLELEEVETRLRELPGVRQAAAAVRRDPQGHARLVAYLVPDGGGAWRAGDEVDPAALQRVRAQLSAALPGYMLPSRVVTLDQLPLTANRKLDRKALPEPAASAPTRAGSAPQGALEQAVCALWEEVFERADIAADDDFFELGGHSLLATRIQVRVNKIFRQTLPLRATFHAQTPRALAALLAERESAPGLAAKIAAVYLKLRGMSDAERDALRRAAAQPSTMETAE

SEQ ID NO: 202 - protein, 390 aa, Chromobacterium haemolyticum
MNTRVKAFAAVEAALAEPEAALANGDFETVERLMSGIRESNRMKGVWLPQVPRADGGLGLSLLELVEVGELLGASPLGHYAVNYQAPDAGNIDVLLEYATPAQRRRWLEPLLRGEVRSCFAATEPESAGSNPSSLKTTAVYKDGGWHLSGRKWFASGADGAGFAIVLAVTDEAAPLHARTSTFIVPTDAPGFRHVRNLRVMGDEGCGWASHGELVLDDCRVGEDAMLGKPGEGFVVLQARLATGRLHHCARWIGVCERAFAIMCRRACRRELAAGELLSSRQTVQNWIAESRASIDAARLLVTQAATRLQNRHERAQIDISIAKFFVAGATQTVLDHSLQVQGALGVSGDTILNVLWRHERAGRIYDGPDEVHKALVARHALAGFRRELT

SEQ ID NO: 203 - protein, 321 aa, Chromobacterium haemolyticum
MSERIAERAMAALGRSGVGARATRVGGGRASEVFLVQGGDSELIAYWLPEGGAREARRRFALLERMAGQFRLAPKPLAVDEDGDAALLLVEKLEGVAPAACGPLAPDTVRRLAENFIATLAGLHALEVAPADRALDYLRRILSEWRRRWNAEEAGEAIDADFRAVADWLTERMPETEPAAWLHNDYKLDNILVDPGDPARVVGVVDWELAAVGHPLADLGAALAYWIESRDSSLLRLDAPGPSCAPGAPTREALVDLYAAAAGREVTAPAYWYAYGLLRLAVITQQLALRRRDEGLRVPRAKLIVRWLLDRAAEACGGGRL

SEQ ID NO: 204 - protein, 319 aa, Chromobacterium haemolyticum
MKAARAPSHSFPIKDTRLMNSETSSMLLDVVVIGGSHAGQSAALQIARARRRVLVIDAGARRNRFAAQSHGVIGLDGRSPDAIAADGKAQLLAYPNAQWRADSVVLAERNDAGYTLRCASGQDYRARQLVLAFGVVDELPELEGLEERWGESVFHCPYCHGYELDRGRIGVLGSGPLSYLSAMLMPEWGQTVFLTDGGFEPDEEQREALARRGVEIVRDRIARIADRATVELADGRRIAFDGLFTMNRFRLSSPVAEQLGCVIEEGPLGPYVRTDDAMETSAPGVFACGDITHRGGTVALAIGNGALAGIAAHRKLVFG

SEQ ID NO: 205 - protein, 372 aa, Chromobacterium haemolyticum
MCGPTTRWKHRRRACSPAATSRIGAAPWRWPSATARWRASPRIANWCSGEARAGRDGAFLFLATGNRSMSWQNLCFSWLLRRTAKSLTRKPGLTAQEMRERSAKWARGEIKPPRGWRVRKLDAQALRGEWIEPEAAERREASGRVILYLHGGGYCFCSPVTHRGVAAELAREADARAFSLDYRLAPEHPFPAAVDDALAAYRALLDEGVAADRIVIAGDSSGGGLALALLLSLRNAGAPLPAGAVLFSPWTDLAATGASLEANDASDVMLSAVAVRNFSRYYLGDAATDHPIASPLYGEYAGLPDLFIQASDTEVLLDDAARVARKASAAGVAVDFKVWRRLPHAWATLAPMLPEARAAIKEAGSFVRKVAP

SEQ ID NO: 206 - protein, 552 aa, Chromobacterium haemolyticum
MFLLAVAQNGQIPDPQARPDRPGNARTQREMGARRNQAAARLAGAQAGRSGAARRVDRAGGRRAARGERAGDPVSARRRLLLLLPGHAPGRGRRAGAGSGRAGVFVGLPACAGTSVPRRRRRRAGGVSGAAGRGRGGGPDRDRRRFVGGRTGARAAAVAAQRGRALAGRRGLVLAVDGSGGDRGLAGSERRVRRDAERGGGEEFLALLPWRRRHRSSHRLAALRRVRGPARSVHPGQRHRSAVGRRRARGPQGERGRRRGGLQGVAAAAARMGHLGAHAAGGEGGDQRGRQFRSQGGAMNREWKPAPGGAWVDAAPAGRHAALRLFCFPYAGGGAAVFRGWEERFPAEVDVRPMHPPGRGRRFHDALRYRLDQLADEATDAITPLLDRPYALFGHSMGASLAFEVAQRARARGLPSPSCLIVSGRAAPHFPARDRPIHALPDEQFLDEVMRMNGTPAEVLEHPELVQIILPVLHADFEAIETYHPEPRPPLNCRILALGGREEVRGAEAAASWRGYTTGGFRSEILPGDHFFLNGRPESLFAILKEELGRAV

SEQ ID NO: 207 - protein, 155 aa, Chromobacterium haemolyticum
MADLSPSDDIRAAMEAFFHAYKAFTDKPDEMLAKRGLARVHHRILFFVARYPGLSVKDLLAALGVTKQAINMPLRQLLEMALVQSVAAQHDKRVKQLTLTLEGRKLEEALHREQLKLLQAAFEQTGKPATAGWMQINRTLAAQSRPDDAPPRGKT

SEQ ID NO: 208 - protein, 389 aa, Chromobacterium haemolyticum
MQSTMFSERIERLSGSLIREILAAAQQPQMISFAGGLPASQCLPTLDFTGMPAAMAQYGASEGEPELRELIAEQARRLGISCEAEQVLVLSGSQQCIDLCAKLFIDPGTPVVTEGPTYLAALQAFKLFGARVHAVGQRDGRLEPQALAAALEQARPRCCYLIPSFQNPAGSCYSVEDRQALAAAIDAAGVPLIEDDPYRALSYDGEAPAPLVSHLKNAPWIYSGSFSKTLAPGLRVGFLIASPELYPYLMRLKQATDLHTNRPAQWFIARQLRDPGHEQRLLDLREVYRVGRDAMQASLQRHFADLADWQLPQGGLFFWLKLKQLRDTRKLLPLALQQNVAFMPGEAFFPEPEQNLGYVRLNFSHASPERIEIGIARLAALLRSQAVEE

SEQ ID NO: 209 - DNA, 16 bp, Artificial Sequence
  Synthetic
taccttgttacgactt

SEQ ID NO: 210 - DNA, 20 bp, Artificial Sequence
  Synthetic
agagtttgatcmtggctcag

What is claimed is:

1. A composition comprising an agriculturally acceptable carrier, a plant or a plant part, and a bacterial strain having a 16S rDNA sequence comprising at least 95% sequence identity to any one of SEQ ID NOs: 1-9, wherein the bacterial strain further comprises a DepA gene, a DepB gene, a DepC gene, a DepF gene, a DepG gene, DepH gene, a DepE gene, or a DepD gene, and wherein the bacterial strain has insecticidal activity.

2. The composition of claim 1, wherein the bacterial strain is a Pseudomonas chlororaphis, a Burkholderia rinojensis, or a Chromobacterium haemolyticum.

3. The composition of claim 1, wherein the bacterial strain is a Pseudomonas chlororaphis strain SS532D1 (NRRL Deposit No. B-67638), a Pseudomonas chlororaphis strain SSP459B9-3 (NRRL Deposit No. B-67639), a Burkholderia rinojensis strain JH59178-1 (NRRL Deposit No. B-67640), a Chromobacterium haemolyticum strain JH91791-1 (NRRL Deposit No. B-67642), a Chromobacterium haemolyticum strain PMCJ4191H4-1 (NRRL Deposit No. B-67644), a Chromobacterium haemolyticum strain JH97285-1 (NRRL Deposit No. B-67641), or a Chromobacterium haemolyticum strain PMC3591F10-1 (NRRL Deposit No. B-67643), or a progeny, mutant, or variant thereof.

4. The composition of claim 1, wherein the bacterial strain produces a depsipeptide as a metabolite.

5. The composition of claim 4, wherein the depsipeptide has the structure of FR901375, FK228, or a derivative or variant thereof.

6. The composition of claim 1, wherein the DepA gene comprises a nucleic acid sequence encoding a polypeptide, wherein the polypeptide has at least 90% sequence identity to any one of SEQ ID NOs: 109, 121, 133, 145, 158, 171, 184, or 197.

7. The composition of claim 6, wherein the nucleic acid sequence comprises at least 90% sequence identity to any one of SEQ ID NOs: 9, 21, 33, 45, 58, 71, 84, or 97.

8. The composition of claim 1, wherein the DepB gene comprises a nucleic acid sequence encoding a polypeptide, wherein the polypeptide has at least 90% sequence identity to any one of SEQ ID NOs: 110, 122, 134, 146, 159, 172, 185, or 198.

9. The composition of claim 8, wherein the nucleic acid sequence comprises at least 90% sequence identity to any one of SEQ ID NOs: 10, 22, 34, 46, 59, 72, 85, or 98.

10. The composition of claim 1, wherein the DepC gene comprises a nucleic acid sequence encoding a polypeptide, wherein the polypeptide has at least 90% sequence identity to any one of SEQ ID NOs: 111, 123, 135, 147, 160, 173, 186, or 199.

11. The composition of claim 10, wherein the nucleic acid sequence comprises at least 90% sequence identity to any one of SEQ ID NOs: 11, 23, 35, 47, 60, 73, 86, or 99.

12. The composition of claim 1, wherein the DepD gene comprises a nucleic acid sequence encoding a polypeptide, wherein the polypeptide has at least 90% sequence identity to any one of SEQ ID NOs: 112, 124, 136, 148, 161, 174, 187, or 200.

13. The composition of claim 12, wherein the nucleic acid sequence comprises at least 90% sequence identity to any one of SEQ ID NOs: 12, 24, 36, 48, 61, 74, 87, or 100.

14. The composition of claim 1, wherein the DepE gene comprises a nucleic acid sequence encoding a polypeptide, wherein the polypeptide has at least 90% sequence identity to any one of SEQ ID NOs: 113, 125, 137, 149, 162, 175, 188, or 201.

15. The composition of claim 14, wherein the nucleic acid sequence comprises at least 90% sequence identity to any one of SEQ ID NOs: 13, 25, 37, 49, 62, 75, 88, or 101.

16. The composition of claim 1, wherein the DepF gene comprises a nucleic acid sequence encoding a polypeptide, wherein the polypeptide has at least 90% sequence identity to any one of SEQ ID NOs: 114, 126, 138, 150, 163, 176, 189, or 202.

17. The composition of claim 16, wherein the nucleic acid sequence comprises at least 90% sequence identity to any one of SEQ ID NOs: 14, 26, 38, 50, 63, 76, 89, or 102.

18. The composition of claim 1, wherein the DepG gene comprises a nucleic acid sequence encoding a polypeptide, wherein the polypeptide has at least 90% sequence identity to any one of SEQ ID NOs: 115, 127, 139, 151, 164, 177, 190, or 203.

19. The composition of claim 18, wherein the nucleic acid sequence comprises at least 90% sequence identity to any one of SEQ ID NOs: 15, 27, 39, 51, 64, 77, 90, or 103.

20. The composition of claim 1, wherein the DepH gene comprises a nucleic acid sequence encoding a polypeptide, wherein the polypeptide has at least 90% sequence identity to any one of SEQ ID NOs: 116, 128, 140, 152, 165, 178, 191, or 204.

21. The composition of claim 20, wherein the nucleic acid sequence comprises at least 90% sequence identity to any one of SEQ ID NOs: 16, 28, 40, 52, 65, 78, 91, or 104.

22. The composition of claim 1, wherein the DepI gene comprises a nucleic acid sequence encoding a polypeptide, wherein the polypeptide has at least 90% sequence identity to any one of SEQ ID NOs: 117, 129, 141, 153, 166, 179, 192, or 205.

23. The composition of claim 22, wherein the nucleic acid sequence comprises at least 90% sequence identity to any one of SEQ ID NOs: 17, 29, 41, 53, 66, 79, 92, or 105.

24. The composition of claim 1, wherein the DepJ gene comprises a nucleic acid sequence encoding a polypeptide, wherein the polypeptide has at least 90% sequence identity to any one of SEQ ID NOs: 118, 130, 142, 154, 167, 180, 193, or 206.

25. The composition of claim 24, wherein the nucleic acid sequence comprises at least 90% sequence identity to any one of SEQ ID NOs: 18, 30, 42, 54, 67, 80, 93, or 106.

26. The composition of claim 1, wherein the DepK gene comprises a nucleic acid sequence encoding a polypeptide, wherein the polypeptide has at least 90% sequence identity to any one of SEQ ID NOs: 143, 155, 168, 181, or 194.

27. The composition of claim 26, wherein the nucleic acid sequence comprises at least 90% sequence identity to any one of SEQ ID NOs: 43, 55, 68, 81, or 94.

28. The composition of claim 1, wherein the DepL gene comprises a nucleic acid sequence encoding a polypeptide, wherein the polypeptide has at least 90% sequence identity to any one of SEQ ID NOs: 119, 131, 156, 169, 182, 195, or 207.

29. The composition of claim 28, wherein the nucleic acid sequence comprises at least 90% sequence identity to any one of SEQ ID NOs: 19, 31, 43, 56, 69, 82, 95, or 107.

30. The composition of claim 1, wherein the DepM gene comprises a nucleic acid sequence encoding a polypeptide, wherein the polypeptide has at least 90% sequence identity to any one of SEQ ID NOs: 120, 132, 144, 157, 170, 183, 196, or 208.

31. The composition of claim 30, wherein the nucleic acid sequence comprises at least 90% sequence identity to any one of SEQ ID NOs: 20, 32, 44, 57, 70, 83, 96, or 108.

32. The composition of claim 1, wherein the composition further comprises a biocontrol agent selected from the group consisting of a bacteria, a fungus, a yeast, a protozoa, a virus, an entomopathogenic nematode, a botanical extract, a protein, a nucleic acid, a secondary metabolite, and an inoculant.

33. The composition of claim 1, wherein the composition further comprises an agrochemically active compound selected from the group consisting of an insecticide, a fungicide, a bactericide, and a nematicide.

34. The composition of claim 1, wherein the composition further comprises a compound selected from the group consisting of a safener, a lipo-chitooligosaccharide, a triglucosamine lipoglycine salt, an isoflavone, and a ryanodine receptor modulator.

35. The composition of claim 1, wherein the plant or the plant part is genetically modified.

36. A fermantate broth, wherein the fermentate broth is produced using a bacterial strain having a 16S rDNA sequence comprising at least 95% sequence identity to any one of SEQ ID NOs: 1-9, wherein the bacterial strain further comprises a DepA gene, a DepB gene, a DepC gene, a DepF gene, a DepG gene, DepH gene, a DepE gene, or a DepD gene, and wherein the fermentate broth has insecticidal activity.

37. The fermentate broth of claim 36, wherein the bacterial strain is a Pseudomonas chlororaphis, a Burkholderia rinojensis, or a Chromobacterium haemolyticum, wherein the Pseudomonas chlororaphis, Burkholderia rinojensis, or Chromobacterium haemolyticum.

38. The fermentate broth of claim 36, wherein the bacterial strain is a Pseudomonas chlororaphis strain SS532D1 (NRRL Deposit No. B-67638), a Pseudomonas chlororaphis strain SSP459B9-3 (NRRL Deposit No. B-67639), a Burkholderia rinojensis strain JH59178-1 (NRRL Deposit No. B-67640), a Chromobacterium haemolyticum strain JH91791-1 (NRRL Deposit No. B-67642), a Chromobacterium haemolyticum strain PMCJ4191H4-1 (NRRL Deposit No. B-67644), a Chromobacterium haemolyticum strain JH97285-1 (NRRL Deposit No. B-67641), or a Chromobacterium haemolyticum strain PMC3591F10-1 (NRRL Deposit No. B-67643), or a progeny, mutant, or variant thereof.

39. The fermentate broth of claim 36, wherein the fermentate broth comprises a depsipeptide produced by the bacterial strain as a metabolite.

40. The fermentate broth of claim 36, wherein the depsipeptide has the structure of FR901375, FK228, or a derivative or variant thereof.

41. The fermentate broth of claim 36, wherein the DepA gene comprises a nucleic acid sequence encoding a polypeptide, wherein the polypeptide has at least 90% sequence identity to any one of SEQ ID NOs: 109, 121, 133, 145, 158, 171, 184, or 197.

42. The fermentate broth of claim 41, wherein the nucleic acid sequence comprises at least 90% sequence identity to any one of SEQ ID NOs: 9, 21, 33, 45, 58, 71, 84, or 97.

43. The fermentate broth of claim 36, wherein the DepB gene comprises a nucleic acid sequence encoding a polypeptide, wherein the polypeptide has at least 90% sequence identity to any one of SEQ ID NOs: 110, 122, 134, 146, 159, 172, 185, or 198.

44. The fermentate broth of claim 43, wherein the nucleic acid sequence comprises at least 90% sequence identity to any one of SEQ ID NOs: 10, 22, 34, 46, 59, 72, 85, or 98.

45. The fermentate broth of claim 36, wherein the DepC gene comprises a nucleic acid sequence encoding a polypeptide, wherein the polypeptide has at least 90% sequence identity to any one of SEQ ID NOs: 111, 123, 135, 147, 160, 173, 186, or 199.

46. The fermentate broth of claim 45, wherein the nucleic acid sequence comprises at least 90% sequence identity to any one of SEQ ID NOs: 11, 23, 35, 47, 60, 73, 86, or 99.

47. The fermentate broth of claim 36, wherein the DepD gene comprises a nucleic acid sequence encoding a polypeptide, wherein the polypeptide has at least 90% sequence identity to any one of SEQ ID NOs: 112, 124, 136, 148, 161, 174, 187, or 200.

48. The fermentate broth of claim 47, wherein the nucleic acid sequence comprises at least 90% sequence identity to any one of SEQ ID NOs: 12, 24, 36, 48, 61, 74, 87, or 100.

49. The fermentate broth of claim 36, wherein the DepE gene comprises a nucleic acid sequence encoding a polypeptide, wherein the polypeptide has at least 90% sequence identity to any one of SEQ ID NOs: 113, 125, 137, 149, 162, 175, 188, or 201.

50. The fermentate broth of claim 49, wherein the nucleic acid sequence comprises at least 90% sequence identity to any one of SEQ ID NOs: 13, 25, 37, 49, 62, 75, 88, or 101.

51. The fermentate broth of claim 36, wherein the DepF gene comprises a nucleic acid sequence encoding a polypeptide, wherein the polypeptide has at least 90% sequence identity to any one of SEQ ID NOs: 114, 126, 138, 150, 163, 176, 189, or 202.

52. The fermentate broth of claim 51, wherein the nucleic acid sequence comprises at least 90% sequence identity to any one of SEQ ID NOs: 14, 26, 38, 50, 63, 76, 89, or 102.

53. The fermentate broth of claim 36, wherein the DepG gene comprises a nucleic acid sequence encoding a polypeptide, wherein the polypeptide has at least 90% sequence identity to any one of SEQ ID NOs: 115, 127, 139, 151, 164, 177, 190, or 203.

54. The fermentate broth of claim 53, wherein the nucleic acid sequence comprises at least 90% sequence identity to any one of SEQ ID NOs: 15, 27, 39, 51, 64, 77, 90, or 103.

55. The fermentate broth of claim 36, wherein the DepH gene comprises a nucleic acid sequence encoding a polypeptide, wherein the polypeptide has at least 90% sequence identity to any one of SEQ ID NOs: 116, 128, 140, 152, 165, 178, 191, or 204.

56. The fermentate broth of claim 55, wherein the nucleic acid sequence comprises at least 90% sequence identity to any one of SEQ ID NOs: 16, 28, 40, 52, 65, 78, 91, or 104.

57. The fermentate broth of claim 36, wherein the DepI gene comprises a nucleic acid sequence encoding a polypeptide, wherein the polypeptide has at least 90% sequence identity to any one of SEQ ID NOs: 117, 129, 141, 153, 166, 179, 192, or 205.

58. The fermentate broth of claim 57, wherein the nucleic acid sequence comprises at least 90% sequence identity to any one of SEQ ID NOs: 17, 29, 41, 53, 66, 79, 92, or 105.

59. The fermentate broth of claim 36, wherein the DepJ gene comprises a nucleic acid sequence encoding a polypeptide, wherein the polypeptide has at least 90% sequence identity to any one of SEQ ID NOs: 118, 130, 142, 154, 167, 180, 193, or 206.

60. The fermentate broth of claim 59, wherein the nucleic acid sequence comprises at least 90% sequence identity to any one of SEQ ID NOs: 18, 30, 42, 54, 67, 80, 93, or 106.

61. The fermentate broth of claim 36, wherein the DepK gene comprises a nucleic acid sequence encoding a polypeptide, wherein the polypeptide has at least 90% sequence identity to any one of SEQ ID NOs: 143, 155, 168, 181, or 194.

62. The fermentate broth of claim 61, wherein the nucleic acid sequence comprises at least 90% sequence identity to any one of SEQ ID NOs: 43, 55, 68, 81, or 94.

63. The fermentate broth of claim 36, wherein the DepL gene comprises a nucleic acid sequence encoding a polypeptide, wherein the polypeptide has at least 90% sequence identity to any one of SEQ ID NOs: 119, 131, 156, 169, 182, 195, or 207.

64. The fermentate broth of claim 63, wherein the nucleic acid sequence comprises at least 90% sequence identity to any one of SEQ ID NOs: 19, 31, 43, 56, 69, 82, 95, or 107.

65. The fermentate broth of claim 36, wherein the DepM gene comprises a nucleic acid sequence encoding a polypeptide, wherein the polypeptide has at least 90% sequence identity to any one of SEQ ID NOs: 120, 132, 144, 157, 170, 183, 196, or 208.

66. The fermentate broth of claim 65, wherein the nucleic acid sequence comprises at least 90% sequence identity to any one of SEQ ID NOs: 20, 32, 44, 57, 70, 83, 96, or 108.

67. A composition comprising the fermentate broth of claim 36, wherein the composition further comprises a biocontrol agent selected from the group consisting of a bacteria, a fungus, a yeast, a protozoa, a virus, an entomopathogenic nematode, a botanical extract, a protein, a nucleic acid, a secondary metabolite, and an innoculant.

68. A composition comprising the fermentate broth of claim 36, wherein the composition further comprises an agrochemically active compound selected from the group consisting of an insecticide, a fungicide, a bactericide, and a nematicide.

69. A composition comprising the fermentate broth of claim 36, wherein the composition further comprises a compound selected from the group consisting of a safener, a lipo-chitooligosaccharide, a triglucosamine lipoglycine salt, an isoflavone, and a ryanodine receptor modulator.

70. A composition comprising the fermentate broth of claim 36, wherein the plant or the plant part is genetically modified.

71. A composition comprising a depsipeptide and an agriculturally acceptable carrier, wherein the depsipeptide has insecticidal activity.

72. The composition of claim 71, wherein the depsipeptide has the structure of FR901375, FK228, or a derivative or variant thereof

[chemical structure]

73. The composition of claim 71, wherein the composition further comprises a biocontrol agent selected from the group consisting of bacteria, a fungus, a yeast, protozoa, a virus, an entomopathogenic nematode, a botanical extract, a protein, a nucleic acid, a secondary metabolite, and an innoculant.

74. The composition of claim 71, wherein the composition further comprises an agrochemically active compound selected from the group consisting of an insecticide, a fungicide, a bactericide, and a nematicide.

75. The composition of claim 71, wherein the composition further comprises a compound selected from the group consisting of a safener, a lipo-chitooligosaccharide, a triglucosamine lipoglycine salt, an isoflavone, and a ryanodine receptor modulator.

76. The composition of claim 71, further comprising a plant or the plant part.

77. The composition of claim 76, wherein the plant or plant part comprises a seed.

78. The composition of claim 76, wherein the plant or the plant part is genetically modified.

79. A method for controlling a plant pathogen, pest, or insect comprising applying to a plant, a plant part, or an environment of a plant or a plant part bacterial strain or a fermentate broth produced by a bacterial strain, wherein the bacterial strain has a 16S rDNA sequence comprising at least 95% sequence identity to any one of SEQ ID NOs: 1-9, wherein the bacterial strain further comprises a DepA gene, a DepB gene, a DepC gene, a DepF gene, a DepG gene, DepH gene, a DepE gene, or a DepD gene, and wherein the bacterial strain has insecticidal activity.

80. The method of claim 79, wherein the bacterial strain is a Pseudomonas chlororaphis, a Burkholderia rinojensis, or a Chromobacterium haemolyticum, wherein the Pseudomonas chlororaphis, Burkholderia rinojensis, or Chromobacterium haemolyticum.

81. The method of claim 79, wherein the bacterial strain is a Pseudomonas chlororaphis strain SS532D1 (NRRL Deposit No. B-67638), a Pseudomonas chlororaphis strain SSP459B9-3 (NRRL Deposit No. B-67639), a Burkholderia rinojensis strain JH59178-1 (NRRL Deposit No. B-67640), a Chromobacterium haemolyticum strain JH91791-1 (NRRL Deposit No. B-67642), a Chromobacterium haemolyticum strain PMCJ4191H4-1 (NRRL Deposit No. B-67644), a Chromobacterium haemolyticum strain JH97285-1 (NRRL Deposit No. B-67641), or a Chromobacterium haemolyticum strain PMC3591F10-1 (NRRL Deposit No. B-67643), or a progeny, mutant, or variant thereof.

82. The method of claim 79, wherein the bacterial strain produces a depsipeptide as a metabolite.

83. The method of claim 79, wherein the depsipeptide has the structure of FR901375, FK228, or a derivative or variant thereof.

84. The method of claim 79, wherein the DepA gene comprises a nucleic acid sequence encoding a polypeptide, wherein the polypeptide has at least 90% sequence identity to any one of SEQ ID NOs: 109, 121, 133, 145, 158, 171, 184, or 197.

85. The method of claim 84, wherein the nucleic acid sequence comprises at least 90% sequence identity to any one of SEQ ID NOs: 9, 21, 33, 45, 58, 71, 84, or 97.

86. The method of claim 79, wherein the DepB gene comprises a nucleic acid sequence encoding a polypeptide, wherein the polypeptide has at least 90% sequence identity to any one of SEQ ID NOs: 110, 122, 134, 146, 159, 172, 185, or 198.

87. The method of claim 86, wherein the nucleic acid sequence comprises at least 90% sequence identity to any one of SEQ ID NOs: 10, 22, 34, 46, 59, 72, 85, or 98.

88. The method of claim 79, wherein the DepC gene comprises a nucleic acid sequence encoding a polypeptide, wherein the polypeptide has at least 90% sequence identity to any one of SEQ ID NOs: 111, 123, 135, 147, 160, 173, 186, or 199.

89. The method of claim 88, wherein the nucleic acid sequence comprises at least 90% sequence identity to any one of SEQ ID NOs: 11, 23, 35, 47, 60, 73, 86, or 99.

90. The method of claim 79, wherein the DepD gene comprises a nucleic acid sequence encoding a polypeptide, wherein the polypeptide has at least 90% sequence identity to any one of SEQ ID NOs: 112, 124, 136, 148, 161, 174, 187, or 200.

91. The method of claim 90, wherein the nucleic acid sequence comprises at least 90% sequence identity to any one of SEQ ID NOs: 12, 24, 36, 48, 61, 74, 87, or 100.

92. The method of claim 79, wherein the DepE gene comprises a nucleic acid sequence encoding a polypeptide, wherein the polypeptide has at least 90% sequence identity to any one of SEQ ID NOs: 113, 125, 137, 149, 162, 175, 188, or 201.

93. The method of claim 92, wherein the nucleic acid sequence comprises at least 90% sequence identity to any one of SEQ ID NOs: 13, 25, 37, 49, 62, 75, 88, or 101.

94. The method of claim 79, wherein the DepF gene comprises a nucleic acid sequence encoding a polypeptide, wherein the polypeptide has at least 90% sequence identity to any one of SEQ ID NOs: 114, 126, 138, 150, 163, 176, 189, or 202.

95. The method of claim 94, wherein the nucleic acid sequence comprises at least 90% sequence identity to any one of SEQ ID NOs: 14, 26, 38, 50, 63, 76, 89, or 102.

96. The method of claim 79, wherein the DepG gene comprises a nucleic acid sequence encoding a polypeptide, wherein the polypeptide has at least 90% sequence identity to any one of SEQ ID NOs: 115, 127, 139, 151, 164, 177, 190, or 203.

97. The method of claim 96, wherein the nucleic acid sequence comprises at least 90% sequence identity to any one of SEQ ID NOs: 15, 27, 39, 51, 64, 77, 90, or 103.

98. The method of claim 79, wherein the DepH gene comprises a nucleic acid sequence encoding a polypeptide, wherein the polypeptide has at least 90% sequence identity to any one of SEQ ID NOs: 116, 128, 140, 152, 165, 178, 191, or 204.

99. The method of claim 98, wherein the nucleic acid sequence comprises at least 90% sequence identity to any one of SEQ ID NOs: 16, 28, 40, 52, 65, 78, 91, or 104.

100. The method of claim 79, wherein the DepI gene comprises a nucleic acid sequence encoding a polypeptide, wherein the polypeptide has at least 90% sequence identity to any one of SEQ ID NOs: 117, 129, 141, 153, 166, 179, 192, or 205.

101. The method of claim 100, wherein the nucleic acid sequence comprises at least 90% sequence identity to any one of SEQ ID NOs: 17, 29, 41, 53, 66, 79, 92, or 105.

102. The method of claim 79, wherein the DepJ gene comprises a nucleic acid sequence encoding a polypeptide, wherein the polypeptide has at least 90% sequence identity to any one of SEQ ID NOs: 118, 130, 142, 154, 167, 180, 193, or 206.

103. The method of claim 102, wherein the nucleic acid sequence comprises at least 90% sequence identity to any one of SEQ ID NOs: 18, 30, 42, 54, 67, 80, 93, or 106.

104. The method of claim 79, wherein the DepK gene comprises a nucleic acid sequence encoding a polypeptide, wherein the polypeptide has at least 90% sequence identity to any one of SEQ ID NOs: 143, 155, 168, 181, or 194.

105. The method of claim 104, wherein the nucleic acid sequence comprises at least 90% sequence identity to any one of SEQ ID NOs: 43, 55, 68, 81, or 94.

106. The method of claim 79, wherein the DepL gene comprises a nucleic acid sequence encoding a polypeptide, wherein the polypeptide has at least 90% sequence identity to any one of SEQ ID NOs: 119, 131, 156, 169, 182, 195, or 207.

107. The method of claim 106, wherein the nucleic acid sequence comprises at least 90% sequence identity to any one of SEQ ID NOs: 19, 31, 43, 56, 69, 82, 95, or 107.

108. The method of claim 79, wherein the DepM gene comprises a nucleic acid sequence encoding a polypeptide, wherein the polypeptide has at least 90% sequence identity to any one of SEQ ID NOs: 120, 132, 144, 157, 170, 183, 196, or 208.

109. The method of claim 108, wherein the nucleic acid sequence comprises at least 90% sequence identity to any one of SEQ ID NOs: 20, 32, 44, 57, 70, 83, 96, or 108.

110. The method of claim 79, further comprising applying to the plant, plant part, seed, or environment of the plant or plant part with an agriculturally acceptable carrier.

111. The method of claim 79, wherein the composition further comprises applying to the plant, plant part, or environment of the plant or plant part a biocontrol agent selected from the group consisting of a bacteria, a fungus, a yeast, a protozoa, a virus, an entomopathogenic nematode, a botanical extract, a protein, a nucleic acid, a secondary metabolite, and an innoculant.

112. The method of claim 79, wherein the composition further comprises applying to the plant, plant part, or environment of the plant or the plant part an agrochemically active compound selected from the group consisting of an insecticide, a fungicide, a bactericide, and a nematicide.

113. The method of claim 79, wherein the composition further comprises applying to the plant, plant part, or environment of the plant or the plant part a compound selected from the group consisting of a safener, a lipo-chitooligosaccharide, a triglucosamine lipoglycine salt, an isoflavone, and a ryanodine receptor modulator.

114. The method of claim 79, wherein the plant, the plant part, or the environment of the plant or the plant part comprises a genetically modified plant, a genetically modified plant part, or an environment of a genetically modified plant or a genetically modified plant part.

115. A method for controlling a plant pathogen, pest, or insect comprising contacting a plant, a plant part, seed, or an environment of a plant, seed, or a plant part with a depsipeptide.

116. The method of claim 115, further comprising applying to the plant, plant part, or environment of the plant or plant part with an agriculturally acceptable carrier.

117. The method of claim 115, wherein the composition further comprises applying to the plant, plant part, or environment of the plant or plant part a biocontrol agent selected from the group consisting of bacteria, a fungus, a yeast, protozoa, a virus, an entomopathogenic nematode, a botanical extract, a protein, a nucleic acid, a secondary metabolite, and an innoculant.

118. The method of claim 115, wherein the composition further comprises applying to the plant, plant part, or environment of the plant or the plant part an agrochemically active compound selected from the group consisting of an insecticide, a fungicide, a bactericide, and a nematicide.

119. The method of claim 115, wherein the composition further comprises applying to the plant, plant part, or environment of the plant or the plant part a compound selected from the group consisting of a safener, a lipo-chitooligosaccharide, a triglucosamine lipoglycine salt, an isoflavone, and a ryanodine receptor modulator.

120. The method of claim 115, wherein the plant, the plant part, or the environment of the plant or the plant part comprises a genetically modified plant, a genetically modified plant part, or an environment of a genetically modified plant or a genetically modified plant part.

121. The method of claim 115, wherein the depsipeptide has the structure of FR901375, FK228, or a derivative or variant thereof.

[chemical structure]

122.
